(19) United States
(12) Patent Application Publication
(10) Pub. No.: US 2026/0035712 A1
(43) Pub. Date: Feb. 5, 2026

(54) PLANTS WITH REDUCED PLASTICITY

(71) Applicants: Donald Danforth Plant Science Center, St Louis, MO (US); The University Court of the University of Glasgow, Glasgow (GB)

(72) Inventors: Dmitri A. NUSINOW, St Louis, MO (US); Matthew A. Jones, Glasgow (GB)

(21) Appl. No.: 18/997,623

(22) PCT Filed: Jul. 24, 2023
(86) PCT No.: PCT/US2023/070851

§ 371 Date: Jan. 22, 2025

Related U.S. Application Data
(60) Provisional application No. 63/391,651, filed on Jul. 22, 2022.

(51) Int. Cl. C12N 15/82; C07K 14/415; C12N 9/22; C12N 15/11

(52) U.S. Cl. CPC C12N 15/8262; C07K 14/415; C12N 9/226; C12N 15/11; C12N 15/8213; C12N 2310/20

(57) ABSTRACT

Plants modified to exhibit reduced plasticity and related methods and compositions are disclosed. The plants have reduced developmental plasticity in response to changes in light and temperature conditions, and exhibit additional features such as earlier, more consistent and uniform flowering regardless of changes in day length and temperature, and reduced listing in the field.

### CROSS-REFERENCE TO RELATED APPLICATIONS

[0001] This application claims priority from Provisional Application No. 63/391,651, filed Jul. 22, 2022, the entire contents of which are hereby incorporated by reference.

### SEQUENCE LISTING

[0002] This application contains a Sequence Listing that has been submitted in .XML format via PatentCenter and is hereby incorporated by reference in its entirety. The .XMI is named 077875_767246_Sequence_Listing, and is 735 kilobytes in size.

### FIELD OF THE INVENTION

[0003] The present disclosure relates to modified plants, and methods and compositions for modifying plants, plant tissues, parts thereof, and seeds exhibiting reduced plasticity compared to wild type.

### BACKGROUND OF THE INVENTION

[0004] One goal of modern breeding programs is to increase the uniformity of crops so that harvesting time is more predictable and quality is consistent. This is true for intensive, precision outdoor farming and Total Controlled Environment Agriculture (TCEA, or vertical farming). However, plants are developmentally plastic and respond to changes in light and temperature to optimize their growth. Developmental plasticity is advantageous in natural conditions where resources and environmental stresses vary across seasons and location, but is disadvantageous in modern crop monoculture where fertilizers, pesticides, irrigation, etc., can be provided. Climate change offers additional challenges, with more varied weather and increasing temperatures disrupting plant development. Importantly, flowering in many crops is dependent on day length and highly influenced by ambient temperatures. This is disruptive to farmers who can only harvest at defined times of the year.

[0005] Accordingly, there is a need for plants with reduced developmental plasticity suitable for intensive, precision outdoor farming practices and TCEA or vertical farming.

### SUMMARY OF THE INVENTION

[0006] One aspect of the instant disclosure encompasses a modified plant or part thereof, plant cell, or seed exhibiting reduced developmental plasticity. The modified plant or part thereof, plant cell, or seed comprises (a) a modification of an endogenous polynucleotide sequence encoding a component of the circadian clock; and (b) an exogenous polynucleotide sequence encoding an environmental signal sensor. The modification of the endogenous polynucleotide sequence encoding the component of the circadian clock modifies expression of the component of the circadian clock; and the modification of the endogenous polynucleotide encoding the environmental signal sensor modifies expression of the environmental signal sensor. The modified expression of the component of the circadian clock and of the environmental signal sensor causes the plant to exhibit (i) reduced developmental plasticity in response to changes in environmental conditions during growth and (ii) modified circadian function.

[0007] The component of the circadian clock can be a component of the evening complex (EC). For instance, the component of the circadian clock is selected from EARLY FLOWERING 3 (ELF3), EARLY FLOWERING 4 (ELF4), LUX ARRHYTHMO (LUX), or any combination thereof. In some aspects, the component of the circadian clock is an ELF3 protein. In some aspects, the modification of a polynucleotide encoding the ELF3 protein is a loss-of-function mutation.

[0008] In some aspects, the plant or part thereof, plant cell, or seed is Arabidopsis thaliana (A. thaliana). When the plant is A. thaliana, the ELF3 protein can comprise an amino acid sequence comprising at least about 75% or more, at least about 85% or more, at least about 95% or more, or 100% sequence identity with an amino acid sequence of SEQ ID NO: 2. In some aspects, the polynucleotide encoding ELF3 comprises a nucleic acid sequence comprising at least about 75% or more, at least about 85% or more, at least about 95% or more, or 100% sequence identity with a nucleic acid sequence of SEQ ID NO: 1 and an ELF3 loss-of-function mutation comprises about 75% or more, at least about 85% or more, at least about 95% or more, or 100% sequence identity with a nucleic acid sequence of SEQ ID NO: 3 (elf3-1), SEQ ID NO: 4 (elf3-2), or a combination thereof.

[0009] In some aspects, the plant or part thereof, plant cell, or seed is Thlaspi arvense (T. arvense). When the plant is T. arvense, the ELF3 protein can comprise an amino acid sequence comprising at least about 75% or more, at least about 85% or more, at least about 95% or more, or 100% sequence identity with an amino acid sequence of SEQ ID NO: 21. In some aspects, the polynucleotide encoding the ELF3 protein comprises a nucleic acid sequence comprising at least about 75% or more, at least about 85% or more, at least about 95% or more, or 100% sequence identity with a nucleic acid sequence of SEQ ID NO: 20. The modification of the polynucleotide encoding the ELF3 protein can comprise a deletion of a nucleic acid segment in the polynucleotide encoding the ELF3 protein, wherein the nucleic acid segment can comprise about 75% or more, at least about 85% or more, at least about 95% or more, or 100% sequence identity with a nucleic acid sequence of SEQ ID NO: 22, a sequence comprising the AGCGCTA nucleic acid sequence, or a combination thereof.

[0010] In some aspects, the modification of the polynucleotide encoding the ELF3 protein comprises a modification introduced by a programmable nucleic acid modification system comprising a CRISPR/Cas nuclease system, wherein the CRISPR/Cas nuclease system comprises a CAS9 protein (dCAS9) and a guide RNA (gRNA). In some aspects, the Cas9 protein is encoded by a nucleic acid sequence comprising at least about 75% or more, at least about 85% or more, at least about 95% or more, or 100% sequence identity with a nucleic acid sequence of SEQ ID NO: 29 and the gRNA comprises a nucleic acid sequence of SEQ ID NO: 30, SEQ ID NO: 31, or a combination thereof. An expression construct expressing the Cas9 protein can comprise a nucleic acid sequence comprising at least about 75% or more, at least about 85% or more, at least about 95% or more, or 100% sequence identity with a nucleic acid sequence starting at base number 1552 to base number 7881 of SEQ ID NO: 32.

[0011] In some aspects, the plant or part thereof, plant cell, or seed is basil. When the plant is basil, the polynucleotide encoding ELF3 can comprise a nucleic acid sequence comprising at least about 75% or more, at least about 85% or more, at least about 95% or more, or 100% sequence identity with a nucleic acid sequence of SEQ ID NO: 13. In some aspects, the modification of the polynucleotide encoding the ELF3 protein comprises a modification introduced by a programmable nucleic acid modification system comprising a CRISPR/Cas nuclease system, wherein the CRISPR/Cas nuclease system comprises a CAS9 protein (dCAS9) and a guide RNA (gRNA). The Cas9 protein can be encoded by a nucleic acid sequence comprising at least about 75% or more, at least about 85% or more, at least about 95% or more, or 100% sequence identity with a nucleic acid sequence of SEQ ID NO: 29 and the gRNA comprises a nucleic acid sequence of SEQ ID NOs: 33-36, or any combination thereof. In some aspects, an expression construct expressing the Cas9 protein comprises a nucleic acid sequence comprising at least about 75% or more, at least about 85% or more, at least about 95% or more, or 100% sequence identity with a nucleic acid sequence starting at base number 1552 to base number 7881 of SEQ ID NO: 32.

[0012] The environmental signal can comprise photoperiod, light intensity and quality, temperature, chemicals, gravity, moisture, biotic or abiotic stress, oxygen and carbon dioxide concentrations, carbohydrate availability, or any combination thereof. For instance, the environmental signal sensor can be a photoreceptor, temperature sensor, CO₂ sensor, O₂ sensor, ethylene sensor, gravitropic sensor, or any combination thereof.

[0013] In some aspects, the environmental signal sensor is a photoreceptor. The photoreceptor can be a phytochrome; a cryptochrome, a phototropin, an F-box containing Flavin binding proteins; UVR8, or any combination thereof. In some aspects, the photoreceptor is a phytochrome photoreceptor. The polynucleotide encoding an environmental signal sensor can encode a phytochrome B photoreceptor. In some aspects, the phytochrome B photoreceptor comprises an amino acid sequence comprising at least about 75% or more, at least about 85% or more, at least about 95% or more, or 100% sequence identity with an amino acid sequence of SEQ ID NO: 6 or SEQ ID NO: 28. In other aspects, the polynucleotide encoding the phytochrome B photoreceptor comprises least about 75% or more, at least about 85% or more, at least about 95% or more, or 100% sequence identity with a nucleic acid sequence of SEQ ID NO: 5 or SEQ ID NO: 28.

[0014] The phytochrome B photoreceptor can be overexpressed, constitutively expressed, or constitutively active. In some aspects, the modification of a polynucleotide encoding a phyB photoreceptor encodes a constitutively active phyB photoreceptor. When the modification of the polynucleotide encoding a phyB photoreceptor encodes a constitutively active phyB photoreceptor, the phytochrome B photoreceptor comprises an amino acid sequence comprising at least about 75% or more, at least about 85% or more, at least about 95% or more, or 100% sequence identity with an amino acid sequence of SEQ ID NO: 8 SEQ ID NO: 12, SEQ ID NO: 26, or any combination thereof. In some aspects, the polynucleotide encoding the phytochrome B photoreceptor comprises least about 75% or more, at least about 85% or more, at least about 95% or more, or 100% sequence identity with a nucleic acid sequence of SEQ ID NO: 7, SEQ ID NO: 11, SEQ ID NO: 25, or any combination thereof.

[0015] In some aspects, the plant or part thereof, plant cell, or seed is Arabidopsis thaliana (A. thaliana). When the plant is A. thaliana, the modified A. thaliana plant can comprise a genetic modification of a polynucleotide encoding PhyB, wherein the polynucleotide comprising the genetic modification encodes a constitutively active PhyB photoreceptor. The constitutively active PhyB photoreceptor can comprise an amino acid sequence comprising at least about 75% or more, at least about 85% or more, at least about 95% or more, or 100% sequence identity with an amino acid sequence of SEQ ID NO: 8 SEQ ID NO: 12, SEQ ID NO: 26, or any combination thereof. In some aspects, the constitutively active PhyB photoreceptor is encoded by a nucleic acid sequence comprising at least about 75% or more, at least about 85% or more, at least about 95% or more, or 100% sequence identity with an amino acid sequence of SEQ ID NO: 7, SEQ ID NO: 11, SEQ ID NO: 25, or any combination thereof. In some aspects, the constitutively active PhyB photoreceptor comprises an amino acid sequence comprising at least about 75% or more, at least about 85% or more, at least about 95% or more, or 100% sequence identity with an amino acid sequence of SEQ ID NO: 8, SEQ ID NO: 12, or both. In other aspects, the constitutively active PhyB photoreceptor is encoded by a nucleic acid sequence comprising at least about 75% or more, at least about 85% or more, at least about 95% or more, or 100% sequence identity with an amino acid sequence of SEQ ID NO: 7, SEQ ID NO: 11, or both.

[0016] In some aspects, the plant or part thereof, plant cell, or seed is T. arvense. The modified T. arvensis plant can comprise a genetic modification of a polynucleotide encoding PhyB, wherein the polynucleotide comprising the genetic modification encodes a constitutively active PhyB photoreceptor. In some aspects, the constitutively active PhyB photoreceptor comprises an amino acid sequence comprising at least about 75% or more, at least about 85% or more, at least about 95% or more, or 100% sequence identity with an amino acid sequence of SEQ ID NO: 8 SEQ ID NO: 12, SEQ ID NO: 26, or any combination thereof. In some aspects, the constitutively active PhyB photoreceptor is encoded by a nucleic acid sequence comprising at least about 75% or more, at least about 85% or more, at least about 95% or more, or 100% sequence identity with an amino acid sequence of SEQ ID NO: 7, SEQ ID NO: 11, SEQ ID NO: 25, or SEQ ID NO: 27. In other aspects, the constitutively active PhyB photoreceptor comprises an amino acid sequence comprising at least about 75% or more, at least about 85% or more, at least about 95% or more, or 100% sequence identity with an amino acid sequence of SEQ ID NO: 26. The constitutively active PhyB photoreceptor can be encoded by a nucleic acid sequence comprising at least about 75% or more, at least about 85% or more, at least about 95% or more, or 100% sequence identity with an amino acid sequence of SEQ ID NO: 25.

[0017] In some aspects, the modified plant or part thereof, plant cell, or seed of can comprise (a) a modification of a polynucleotide encoding an ELF3 protein wherein the polynucleotide encoding the ELF3 protein comprises an ELF3 loss-of-function mutation; and (b) a modification of a polynucleotide encoding a phyB photoreceptor wherein the polynucleotide encodes a constitutively active PhyB photoreceptor. In some aspects, the modified plant comprises constitutively inactivated temperature input to the circadian clock and a constitutively activated light input to the circadian clock. In some aspects, the modified plant is not etiolated, flowers earlier and consistently regardless of changes in day length and has a reduced cellular elongation response to increasing temperature thereby reducing listing in the field, and any combination thereof.

[0018] In some aspects, the modified plant is plant is A. thaliana. The modified A. thaliana can comprise (a) a polynucleotide encoding an ELF3 protein wherein the polynucleotide encoding the ELF3 protein comprises an ELF3 loss-of-function mutation, wherein the polynucleotide comprises a nucleic acid sequence comprising at least about 75% or more, at least about 85% or more, at least about 95% or more, or 100% sequence identity with an amino acid sequence of SEQ ID NO: 3 (elf3-1), SEQ ID NO: 4 (elf3-2), or a combination thereof; and (b) a polynucleotide encoding a constitutively active PhyB photoreceptor, wherein the polynucleotide comprises a nucleic acid sequence comprising at least about 75% or more, at least about 85% or more, at least about 95% or more, or 100% sequence identity with an amino acid sequence of SEQ ID NO: 7, SEQ ID NO: 11, or a combination thereof.

[0019] In other aspects, the modified plant is plant is T. arvensis comprising (a) a polynucleotide encoding an ELF3 protein wherein the polynucleotide encoding the ELF3 protein comprises an ELF3 loss-of-function mutation, wherein the polynucleotide comprises a nucleic acid sequence comprising at least about 75% or more, at least about 85% or more, at least about 95% or more, or 100% sequence identity with an amino acid sequence of SEQ ID NO: 22, a sequence comprising the AGCGCTA nucleic acid sequence, or a combination thereof; and (b) a polynucleotide encoding a constitutively active PhyB photoreceptor, wherein the polynucleotide comprises a nucleic acid sequence comprising at least about 75% or more, at least about 85% or more, at least about 95% or more, or 100% sequence identity with an amino acid sequence of SEQ ID NO: 25.

[0020] Another aspect of the instant disclosure encompasses a system for modifying a component of the circadian clock, an environmental signal sensor, or both in a plant. The system can comprise a nucleic acid construct comprising at least one or both of: (a) a programmable nucleic acid modification system comprising a targeting nucleic acid sequence targeting a nucleic acid sequence in a polynucleotide sequence encoding a component of the circadian clock; and (b) an expression construct comprising a promoter operably linked to a polynucleotide encoding a polynucleotide encoding an environmental signal sensor; wherein (a) introduces a loss of function mutation into the polynucleotide sequence encoding the component of the circadian clock, and wherein (b) increases expression of the environmental signal sensor, thereby causing the plant to exhibit reduced developmental plasticity in response to changes in environmental conditions during growth and modified circadian function.

[0021] In some aspects, the programmable nucleic acid modification system introduces a loss of function mutation into a polynucleotide encoding an ELF3 protein. In some aspects, the programmable nucleic acid modification system comprises a CRISPR/Cas nuclease system comprising a CAS9 protein (dCAS9) and a guide RNA (gRNA).

[0022] The plant can be T. arvense. When the plant is T. arvense, the Cas9 protein can be encoded by a nucleic acid sequence comprising at least about 75% or more, at least about 85% or more, at least about 95% or more, or 100% sequence identity with a nucleic acid sequence of SEQ ID NO: 29 and the gRNA comprises a nucleic acid sequence of SEQ ID NO: 30, SEQ ID NO: 31, or both.

[0023] The plant can also be basil. When the plant is basil, the Cas9 protein can be encoded by a nucleic acid sequence comprising at least about 75% or more, at least about 85% or more, at least about 95% or more, or 100% sequence identity with a nucleic acid sequence of SEQ ID NO: 29 and the gRNA can comprise a nucleic acid sequence of SEQ ID NOs: 33-36, or any combination thereof.

[0024] In some aspects, the expression construct comprises a promoter operably linked to a polynucleotide encoding a polynucleotide encoding a PhyB photoreceptor, wherein the expression construct increases expression of PhyB. In some aspects, the expression construct comprising a promoter operably linked to a polynucleotide encoding an environmental signal sensor comprises a 35S promoter operably linked to a polynucleotide encoding the PhyB photoreceptor and the construct constitutively expresses the PhyB photoreceptor. In some aspects, the PhyB photoreceptor is constitutively active. When the PhyB photoreceptor is constitutively active, the expression construct can comprise a nucleic acid sequence comprising about 75% or more, at least about 85% or more, at least about 95% or more, or 100% sequence identity with SEQ ID NO: 24. In some aspects, the expression construct comprises a nucleic acid sequence comprising a nucleic acid sequence comprising about 75% or more, at least about 85% or more, at least about 95% or more, or 100% of a nucleic acid sequence starting at base 8148 to base 12020 of SEQ ID NO: 19.

[0025] Another aspect of the instant disclosure encompasses a modified plant or part thereof, plant cell, or seed comprising one or more systems for modifying a plant exhibiting reduced developmental plasticity. The systems can be as described herein above.

[0026] Yet another aspect of the instant disclosure encompasses one or more expression constructs for modifying a plant or part thereof, plant cell, or seed exhibiting reduced developmental plasticity, the one or more expression constructs comprising at least one or both of: (a) an expression construct for modifying the expression of a component of the circadian clock, and (b) an expression construct for modifying the expression of an environmental signal sensor.

[0027] The expression construct for modifying the expression of a component of the circadian clock can comprise a promoter operably linked to a polynucleotide encoding a programmable nucleic acid modification system targeted to a nucleic acid sequence in a polynucleotide encoding a component of the circadian clock. In some aspects, the programmable nucleic acid modification system comprises a CRISPR/Cas nuclease system and wherein the CRISPR/Cas nuclease system comprises a CAS9 protein (dCAS9) and a guide RNA (gRNA). In some aspects, an expression construct expressing the Cas9 protein comprises a nucleic acid sequence comprising at least about 75% or more, at least about 85% or more, at least about 95% or more, or 100% sequence identity with a nucleic acid sequence starting at base number 1552 to base number 7881 of SEQ ID NO: 32.

[0028] In some aspects, the plant is T. arvense. When the plant is T. arvense, the polynucleotide encoding a component of the circadian clock can encode ELF3, wherein the polynucleotide encoding ELF3 can comprise a nucleic acid sequence comprising at least about 75% or more, at least about 85% or more, at least about 95% or more, or 100% sequence identity with a nucleic acid sequence of SEQ ID NO: 20 and the gRNA can comprise a nucleic acid sequence of SEQ ID NO: 30, SEQ ID NO: 31, or both. In some aspects, the expression construct comprises a nucleic acid sequence comprising about 75% or more, at least about 85% or more, at least about 95% or more, or 100% sequence identity with a nucleic acid sequence starting at base 254 to base 1287 of SEQ ID NO: 32.

[0029] The plant can also be Basil. When the plant is basil, the polynucleotide encoding a component of the circadian clock can encode ELF3, the polynucleotide encoding ELF3 can comprise a nucleic acid sequence comprising at least about 75% or more, at least about 85% or more, at least about 95% or more, or 100% sequence identity with a nucleic acid sequence of SEQ ID NO: 13, and the gRNA can comprise a nucleic acid sequence of SEQ ID NOs: 33-36, or any combination thereof. In some aspects, an expression construct expressing the gRNA of SEQ ID NOs: 33-36 comprises a nucleic acid sequence comprising about 75% or more, at least about 85% or more, at least about 95% or more, or 100% sequence identity with the gRNA expression construct of SEQ ID NO: 37. In some aspects, an expression construct expressing the gRNA of SEQ ID NOs: 33-36 comprises about 75% or more, at least about 85% or more, at least about 95% or more, or 100% sequence identity with SEQ ID NO: 23. In some aspects, the expression construct expressing the gRNA of SEQ ID NOs: 33-36 comprises about 75% or more, at least about 85% or more, at least about 95% or more, or 100% of a nucleic acid sequence starting at base 695 to base 2799 of SEQ ID NO: 37.

[0030] In some aspects, the expression construct comprising a promoter operably linked to a polynucleotide encoding an environmental signal sensor comprises a constitutive expression promoter operably linked to a polynucleotide encoding a PhyB photoreceptor. In some aspects, the expression construct comprising a promoter operably linked to a polynucleotide encoding an environmental signal sensor comprises a 35S promoter operably linked to a polynucleotide encoding a constitutively active PhyB photoreceptor. The constitutively active PhyB photoreceptor can be encoded by a nucleic acid sequence comprising about 75% or more, at least about 85% or more, at least about 95% or more, or 100% sequence identity with a nucleic acid sequence of SEQ ID NO: 7, SEQ ID NO: 11, or both. In some aspects, the expression construct comprises a nucleic acid sequence comprising about 75% or more, at least about 85% or more, at least about 95% or more, or 100% sequence identity with SEQ ID NO: 24. In some aspects, the expression construct comprising a nucleic acid sequence comprising about 75% or more, at least about 85% or more, at least about 95% or more, or 100% of a nucleic acid sequence starting at base 8148 to base 12020 of SEQ ID NO: 19.

[0031] An additional aspect of the instant disclosure encompasses a modified plant or part thereof, plant cell, or seed comprising one or more expression constructs for modifying a plant exhibiting reduced developmental plasticity. The constructs can be as described herein above.

[0032] One aspect of the instant disclosure encompasses a method of improving performance of a plant or part thereof, plant cell, or seed grown under intensive, precision outdoor farming conditions, Total Controlled Environment Agriculture (TCEA), or vertical farming. The method comprises obtaining or having obtained a modified plant or part thereof, plant cell, or seed exhibiting reduced developmental plasticity; and cultivating the plant under intensive, precision outdoor farming conditions, TCEA, or vertical farming.

[0033] A yet additional aspect of the instant disclosure encompasses a method of reducing developmental plasticity of a plant or part thereof, plant cell, or seed. The method comprises generating a modified plant comprising one or more expression constructs for modifying a plant or part thereof, plant cell, or seed exhibiting reduced developmental plasticity. The plant or part thereof, plant cell, or seed can be as described herein above. The plant can be resistant to changes in growth conditions of the plant. In some aspects, the growth conditions comprise daylength and temperature.

[0034] One aspect of the instant disclosure encompasses a method of reducing a plastic response to competition among a co-cultivated group of plants or parts thereof, plant cells, or seeds. The method comprises, co-cultivating a group of modified plants or parts thereof, plant cells, or seeds exhibiting reduced developmental plasticity. The of plants or parts thereof, plant cells, or seeds can be as described herein above.

[0035] Another aspect of the instant disclosure encompasses a method of stabilizing production of a metabolite, nucleic acid, or protein in a plant or part thereof, plant cell, or seed. The method comprises obtaining or having obtained a modified plant or part thereof, plant cell, or seed exhibiting reduced developmental plasticity; cultivating the plant for a time sufficient to generate the metabolite, nucleic acid, or protein; and harvesting the metabolite, nucleic acid, or protein from the plant or part thereof, plant cell, or seed. In some aspects, the plant is grown under intensive, precision outdoor farming conditions, TCEA, or vertical farming. In some aspects, stabilizing production of a metabolite, nucleic acid, or protein can comprise equal production of the metabolite, nucleic acid, or protein irrespective of light period, temperature variation or both.

[0036] Another aspect of the instant disclosure encompasses a kit for modifying a plant or part thereof, plant cell, or seed exhibiting reduced developmental plasticity. The kit comprises: (a) one or more modified plant or part thereof, plant cell, or seed exhibiting reduced developmental plasticity; (b) one or more expression constructs for modifying a plant or part thereof, plant cell, or seed to exhibit reduced developmental plasticity; (c) one or more modified plants or parts thereof, plant cells, or seeds comprising one or more expression constructs for modifying a plant or part thereof, plant cell, or seed to exhibit reduced developmental plasticity; or any combination of (a) to (c). The plants or parts thereof, plant cells, or seeds and the constructs can be as described herein above.

### BRIEF DESCRIPTION OF THE FIGURES

[0037] The patent or application file contains at least one drawing executed in color. Copies of this patent or patent application publication with color drawing(s) will be provided by the Office upon request and payment of the necessary fee.

[0038] FIG. 1 is a simplified representation of the plant circadian regulatory network. Similar genes operating at similar times during the day in a similar manner are grouped together in white circles. Black lines with blunt ends indicate genes function as repressors in the negative feedback loops. Gray lines and arrows indicate genes acting as activators in the regulatory network.

[0039] FIG. 2A is a schematic representation of how light signaling pathways integrate with the circadian clock regulatory network. The underlying clock network is the same as FIG. 1 with the light-signaling pathway linking to points in the circadian regulatory network. Red and blue pathways indicate how these different wavelengths of light are integrated into the clock at different points via independent pathways.

[0040] FIG. 2B is a schematic representation of how temperature signaling pathways integrate with the circadian clock regulatory network. The underlying clock network is the same as FIG. 1 with the temperature-signaling pathway linking to points in the circadian regulatory network. Different temperatures influence the same pathway (blue to orange shaded box), with cooler temperatures stabilizing complex formation and warmer temperatures releasing growth factors such as PIFs.

[0041] FIG. 3A is a plot showing the accumulation of PHYB and YHB transcript in wild-type, YHB, elf3-2, and PHYB::YHB(elf3) seedlings determined using qRT-PCR.

[0042] FIG. 3B is a photo or seedlings of WT, elf3-2, YHB, and YHB (elf3-2) E269.11 grown in constant darkness.

[0043] FIG. 3C is a plot showing hypocotyl elongation of seedlings grown under either constant darkness, short day (8:16) or long day (16:8) light:dark cycles for 6 days.

[0044] FIG. 3D is a plot showing hypocotyl elongation in response to temperature. Seedlings were grown in short day (8:16) light:dark cycles at the indicated temperature for 6 days.

[0045] FIG. 3E are photographs of plants showing the rosette phenotype of adult PHYB::YHB seedlings following growth under short day conditions.

[0046] FIG. 3F is a plot showing flowering phenotype of PHYB::YHB seedlings grown under short- or long-day conditions.

[0047] FIG. 4A is a plot showing the hypocotyl elongation response of wild type, elf3-1, phyb-9, elf3-1 phyB-9, and elf3-1 phyb-9 YHB plants when combined in response to daylength. Seedlings were grown under either short day (8 light:16 dark), day neutral (12 light:12 dark) or long day (16 light:8 dark) cycles for 6 days at 22° C. at ˜80 μmol m-2 s-1.

[0048] FIG. 4B is a plot showing the hypocotyl elongation response of wild type, elf3-1, phyb-9, elf3-1 phyB-9, and elf3-1 phyb-9 YHB plants when combined in response to temperature. Seedlings were grown under day neutral (12 light:12 dark) cycles at ˜80 μmol m-2 s-1 at either 16° C., 22° C., or 28° C. for 6 days before measurement.

[0049] FIG. 5A is a plot showing the circadian rhythms of wild type, elf3-2, PHYB::YHB and PHYB::YHB elf3-2 plants in constant darkness, measured by luciferase bioluminescence driven by the circadian CCA1 promoter. White boxes indicate periods of light irradiation in light:dark cycles prior to transfer to constant darkness. Dark grey segments indicate periods of darkness; light grey segments highlight periods of subjective daytime when held in constant darkness. Zeitgeber time is hours since last dawn.

[0050] FIG. 5B is a plot showing the circadian rhythms of wild type, elf3-1, elf3-1 phyb-9, and elf3-1 phyb-9 35S::YHB plants in constant darkness, measured by luciferase bioluminescence driven by the circadian CCA1 promoter. White boxes indicate periods of light irradiation in light:dark cycles prior to transfer to constant darkness. Dark grey segments indicate periods of darkness; light grey segments highlight periods of subjective daytime when held in constant darkness. Zeitgeber time is hours since last dawn.

[0051] FIG. 6A. The combination of YHB and elf3 alleles alters gene expression additively compared to either allele alone. Heatmap showing fold change of transcript abundance (log 2FC) for each core circadian clock gene (list of circadian genes taken from Hsu and Harmer, 2014) in dark treated elf3-2, YHB, and YHB(elf3-2) seedlings respective to the expression in wild type (Col-0).

[0052] FIG. 6B. The combination of YHB and elf3 alleles alters gene expression additively compared to either allele alone. Venn diagram of highly differentially expressed (log 2FC>1.0, p<0.05) circadian genes in one or more mutant genotypes with respect to wild type.

[0053] FIG. 6C. The combination of YHB and elf3 alleles alters gene expression additively compared to either allele alone. Heatmap showing highly differentially expressed (log 2FC>1.0, p<0.05) genes associated with photomorphogenesis (list of photomorphogenesis genes taken from TAIR keywords in either of dark treated YHB, YHB(elf3-2) or elf3-2 seedlings respective to the expression in wild type (Col-0).

[0054] FIG. 6D. The combination of YHB and elf3 alleles alters gene expression additively compared to either allele alone. Venn diagram of highly differentially expressed (log 2FC>1.0, p<0.05) genes associated with photomorphogenesis in one or more mutant genotypes with respect to wild type. Normalized transcript abundance in wild type samples was used to calculate fold change difference of transcript abundance. Data shows the average of the three independent biological replicates.

[0055] FIG. 6E. ELF3 is required to enable YHB-driven circadian rhythms of GIGANTEA (GI) in constant darkness. Real-time reverse transcription polymerase chain reaction showing steady-state accumulation of GI transcripts in wild type, YHB, YHB(elf3-2) and elf3-2 seedlings. Seedlings were grown for 12 days under 12 hrs:12 hrs light:dark cycles on 0.5MS plates before transfer to constant darkness at ZT12. RNA was extracted from pools of ca. 20 seedlings for each genotype and used to synthesise cDNA. qRT-PCR data was normalised to the expression of three internal control genes (APA1, APX3 and IPP2), and shows the average expression from three independent experiments.

[0056] FIG. 6F. ELF3 is required to enable YHB-driven circadian rhythms of PRR9 in constant darkness. Real-time reverse transcription polymerase chain reaction showing steady-state accumulation of PRR9 transcripts in wild type, YHB, YHB(elf3-2) and elf3-2 seedlings. Seedlings were grown for 12 days under 12 hrs:12 hrs light:dark cycles on 0.5MS plates before transfer to constant darkness at ZT12. RNA was extracted from pools of ca. 20 seedlings for each genotype and used to synthesise cDNA. qRT-PCR data was normalised to the expression of three internal control genes (APA1, APX3 and IPP2), and shows the average expression from three independent experiments.

[0057] FIG. 6G. ELF3 is required to enable YHB-driven circadian rhythms of CCA1 in constant darkness. Real-time reverse transcription polymerase chain reaction showing steady-state accumulation of CCA1 transcripts in wild type, YHB, YHB(elf3-2) and elf3-2 seedlings. Seedlings were grown for 12 days under 12 hrs:12 hrs light:dark cycles on 0.5MS plates before transfer to constant darkness at ZT12. RNA was extracted from pools of ca. 20 seedlings for each genotype and used to synthesise cDNA. qRT-PCR data was normalised to the expression of three internal control genes (APA1, APX3 and IPP2), and shows the average expression from three independent experiments.

[0058] FIG. 6H. ELF3 is required to enable YHB-driven circadian rhythms of LHY in constant darkness. Real-time reverse transcription polymerase chain reaction showing steady-state accumulation of LHY transcripts in wild type, YHB, YHB(elf3-2) and elf3-2 seedlings. Seedlings were grown for 12 days under 12 hrs:12 hrs light:dark cycles on 0.5MS plates before transfer to constant darkness at ZT12. RNA was extracted from pools of ca. 20 seedlings for each genotype and used to synthesise cDNA. qRT-PCR data was normalised to the expression of three internal control genes (APA1, APX3 and IPP2), and shows the average expression from three independent experiments.

[0059] FIG. 7A. Characterisation of additional YHB elf3 alleles. Relative gene expression of wild type PHYB and YHB transcript in 6 day old Col-0 (Wild type), PHYB::YHB, elf3-2, and four independently-transformed PHYB::YHB(elf3-2) lines.

[0060] FIG. 7B. Characterisation of additional YHB elf3 alleles. Relative gene expression of wild type PHYB and YHB transcript in 6 day old Col-0 (Wild type), phyb-9, elf3-1, and a 35S::YHB(phyb-9 elf3-1) line.

[0061] FIG. 7C. Characterisation of additional YHB elf3 alleles. Assessment of circadian rhythms following transfer to constant darkness in additional PHYB::YHB (elf3-2) transformed lines. White boxes indicate periods of light irradiation in light:dark cycles prior to transfer to constant darkness. Dark grey segments indicate periods of darkness; light grey segments highlight periods of subjective daytime when held in constant darkness. Zeitgeber time is hours since last dawn.

[0062] FIG. 7D. Characterisation of additional YHB elf3 alleles. Assessment of circadian rhythms following transfer to constant darkness in 35S::YHB (phyb-9 elf3-1) seedlings. White boxes indicate periods of light irradiation in light:dark cycles prior to transfer to constant darkness. Dark grey segments indicate periods of darkness; light grey segments highlight periods of subjective daytime when held in constant darkness. Zeitgeber time is hours since last dawn.

[0063] FIG. 8A. Venn diagram highlighting circadian-regulated promoters bound by phyB or ELF3. Promoters bound by either phyB (red) or ELF3 (blue) are highlighted. ‘Core’ circadian gene list taken from Hsu and Harmer 2014.

[0064] FIG. 8B. Patterns of gene expression correlate with reported binding patterns for phyB and ELF3. Binding patterns of phyB (red) and ELF3 (blue) at CCA1, LHY, PRR9 and GI loci at different temperatures (phyB data) or throughout the day (ELF3 data).

[0065] FIG. 9A. YHB elf3 plants retain daily variation of gene expression in light:dark cycles. Luciferase bioluminescence reporting activity of the circadian-regulated CCA1 promoter in transgenic Arabidopsis (CCA1::LUC2). Rhythms are maintained in all genotypes in driven light:dark cycles (indicated by black bars), but are lost in constant light (subjective night indicated by grey bars).

[0066] FIG. 9B. YHB elf3 plants retain daily variation of gene expression in light:dark cycles. Daily patterns of gene expression (represented by CCA1-driven bioluminescence) are maintained in square-wave light conditions. White box indicates relative light intensity (right hand axis).

[0067] FIG. 9C. YHB elf3 plants retain daily variation of gene expression in light:dark cycles. Daily patterns of gene expression (represented by CCA1-driven bioluminescence) are maintained in fluctuating light conditions. White box indicates relative light intensity (right hand axis).

[0068] FIG. 10A. YHB elf3 plants demonstrate less developmental plasticity in response to varying environmental cues. Quantification of hypocotyl length of plants grown in constant darkness, short days, long days, or varied light cycles. Asterisks indicate a significantly different hypocotyl length than plants of the same genotype grown in constant darkness (p<0.05). Short days describes daily cycles of 8 hrs:16 hrs light:dark (square-form), long days describes daily cycles of 16 hrs:8 hrs light:dark (square-form), varied light describes daily cycles of 1 hrs 10 μmol m-2 s-1, 8 hrs 40 μmol m-2 s-1, 5 hrs 30 μmol m-2 s-1, 4 hrs 10 μmol m-2 s-1 white light followed by 6 hrs of darkness.

[0069] FIG. 10B. YHB elf3 plants demonstrate less developmental plasticity in response to varying environmental cues. Representative images of wild type (Col-0), YHB, YHB(elf3-2) and elf3-2 seedlings grown for 21 days under long days. Short days describes daily cycles of 8 hrs:16 hrs light:dark (square-form), long days describes daily cycles of 16 hrs:8 hrs light:dark (square-form), varied light describes daily cycles of 1 hrs 10 μmol m-2 s-1, 8 hrs 40 μmol m-2 s-1, 5 hrs 30 μmol m-2 s-1, 4 hrs 10 μmol m-2 s-1 white light followed by 6 hrs of darkness.

[0070] FIG. 10C. YHB elf3 plants demonstrate less developmental plasticity in response to varying environmental cues. Rosette diameter at flowering of Arabidopsis plants grown under either long days or short days light. Short days describes daily cycles of 8 hrs:16 hrs light:dark (square-form), long days describes daily cycles of 16 hrs:8 hrs light:dark (square-form).

[0071] FIG. 10D. YHB elf3 plants demonstrate less developmental plasticity in response to varying environmental cues. Flowering time of wild type, YHB, YHB(elf3-2) and elf3-2 plants grown under long (16 hr:8 hr light:dark) or short (8 hr:16 hr light:dark) days. Asterisks indicate a significant difference in flowering time between plants of the given genotype grown in long and short days (p<0.0001). Short days describes daily cycles of 8 hrs:16 hrs light:dark (square-form), long days describes daily cycles of 16 hrs:8 hrs light:dark (square-form).

[0072] FIG. 10E. YHB elf3 plants demonstrate less developmental plasticity in response to varying environmental cues. Flowering time of plants grown under 12:12 light dark cycles with 160 μmol m-2 s-1 white light. After germination and establishment for 7 days at 22° C., plants were transferred to a constant temperature of either 22° C. or 27° C. as indicated.

[0073] FIG. 10F. YHB elf3 plants demonstrate less developmental plasticity in response to varying environmental cues. Average rosette area over time of Arabidopsis plants grown under short days. Short days describes daily cycles of 8 hrs:16 hrs light:dark (square-form),

[0074] FIG. 10G. YHB elf3 plants demonstrate less developmental plasticity in response to varying environmental cues. Average rosette area over time of plants grown under long days. Long days describes daily cycles of 16 hrs:8 hrs light:dark (square-form).

[0075] FIG. 10H. YHB elf3 plants demonstrate less developmental plasticity in response to varying environmental cues. Expanded graph of FIG. 10F shows reduced growth in YHB elf3 during the first 35 days of growth in short day conditions. Short days describes daily cycles of 8 hrs:16 hrs light:dark (square-form).

[0076] FIG. 11A. YHB and YHB (elf3) seedlings retain responses to light and temperature. Phase response curves of Col-0, YHB, YHB(elf3-2) and elf3-2 seedlings. Seedlings were held in constant light for the indicated time (y axis) prior to release into constant darkness for imaging. Phase is reported relative to CTO (dawn for entrained plants) and was defined as the time until maximal CCA1-driven bioluminescence.

[0077] FIG. 11B. YHB and YHB (elf3) seedlings retain responses to light and temperature. Circadian free running period estimates of plants transferred to varied intensities of white light at different constant temperatures. Wild type, YHB, YHB(elf3-2) and elf3-2 seedlings expressing a CCA1::LUC2 reporter, entrained for 7 days under 12 hr:12 hr light:dark cycles at 22° C. before transfer to constant light at a temperature of 12° C. Plants were imaged every 2 hours after transfer to constant light at the intensity indicated on the x-axis of each plot. Data shows the average free running periods from two independent experiments.

[0078] FIG. 11C. YHB and YHB (elf3) seedlings retain responses to light and temperature. Circadian free running period estimates of plants transferred to varied intensities of white light at different constant temperatures. Wild type, YHB, YHB(elf3-2) and elf3-2 seedlings expressing a CCA1::LUC2 reporter, entrained for 7 days under 12 hr:12 hr light:dark cycles at 22° C. before transfer to constant light at a temperature of 17° C. Plants were imaged every 2 hours after transfer to constant light at the intensity indicated on the x-axis of each plot. Data shows the average free running periods from two independent experiments.

[0079] FIG. 11D. YHB and YHB (elf3) seedlings retain responses to light and temperature. Circadian free running period estimates of plants transferred to varied intensities of white light at different constant temperatures. Wild type, YHB, YHB(elf3-2) and elf3-2 seedlings expressing a CCA1::LUC2 reporter, entrained for 7 days under 12 hr:12 hr light:dark cycles at 22° C. before transfer to constant light at a temperature of 22° C. Plants were imaged every 2 hours after transfer to constant light at the intensity indicated on the x-axis of each plot. Data shows the average free running periods from two independent experiments.

[0080] FIG. 11E. YHB and YHB (elf3) seedlings retain responses to light and temperature. Circadian free running period estimates of plants transferred to varied intensities of white light at different constant temperatures. Wild type, YHB, YHB(elf3-2) and elf3-2 seedlings expressing a CCA1::LUC2 reporter, entrained for 7 days under 12 hr:12 hr light:dark cycles at 22° C. before transfer to constant light at a temperature of 27° C. Plants were imaged every 2 hours after transfer to constant light at the intensity indicated on the x-axis of each plot. Data shows the average free running periods from two independent experiments.

[0081] FIGS. 12A-12D. Additional description of data presented in FIGS. 11B-11E. Data from FIGS. 11B-11E is replotted as temperature response curves.

[0082] FIG. 13. Diagrammatic representation of a nucleic acid modification in a polynucleotide encoding an elf3 protein in pennycress generated using CRISPR editing. Two independent editing events resulting in either a 7 bp or 1683 bp deletion are shown as a comparison of the sequencing chromatogram (below) to the genomic sequence (above) starting from the start of translation in exon 1. The gene structure of pennycress ELF3 is represented by exons as thick black rectangles and introns as thin black lines.

### DETAILED DESCRIPTION

[0083] The present disclosure is based in part on the surprising demonstration of reduced developmental plasticity obtained when a combination of two or more genetic modifications in the environmental sensing and circadian clock mechanisms of the plant provides advantages over each genetic modification individually. More specifically, the inventors surprisingly discovered that ability of the plant to sense and respond to environmental cues, when combined with a modification of a circadian function of the plant, can reduce the plasticity of the plant in response to changes in environmental conditions during growth all while exhibiting improved agronomic traits regardless of changing environmental conditions. For instance, plants comprising both genetic modifications can flower consistently and uniformly regardless of differences in day length, at varied latitudes, in the face of climate change, increasing temperatures and disrupting weather patterns, or any combination thereof. The genetic modifications increase the uniformity of crops so that harvesting time is more predictable and quality is consistent in intensive, precision outdoor farming practices and Total Controlled Environment Agriculture (TCEA, or vertical farming).

### I. Genetically Modified Plants

[0084] One aspect of the present disclosure encompasses a genetically modified plant, plant tissues, part thereof, plant cell, or seed (hereinafter referred to as “genetically modified plants” or “modified plants”) having reduced developmental plasticity and improved agronomic traits. The modified plants comprise at least two genetic modifications that modify the expression of two or more components of the circadian system. The main components of a circadian system are the central oscillator (the circadian clock) that controls circadian functions by maintaining a roughly 24-h rhythm even in the absence of input signals, the input signals from the environment that reset the clock, and the output signals that generate daily rhythms in pathways associated with development, physiology, and metabolism. As used herein, the term “circadian function” is defined as the effect on plant growth and development resulting from the circadian system in response to sensed environmental factors. Non-limiting examples of circadian functions include transitions from shoot elongation, regulation of root gravitropism, altered flowering time, growth cessation of leaves, and timing of germination, the synthesis of chlorophyll, de-etiolation (when a seedling emerges into the light and starts its photo-autotrophic life style), stomata development, transition to flowering, senescence, shade avoidance, elongation of seedlings, size, shape, number, and movement of leaves, and the timing of flowering in adult plants

[0085] In some aspects, the modified plants comprise a nucleic acid modification in a polynucleotide encoding a component of the circadian clock and a nucleic acid modification of a polynucleotide encoding an environmental signal sensor. The nucleic acid modifications modify the expression of the component of the circadian clock and the environmental signal sensor. As used herein, “expression” includes but is not limited to one or more of the following: transcription of a gene into precursor mRNA; splicing and other processing of the precursor mRNA to produce mature mRNA; mRNA stability; translation of the mature mRNA into protein (including codon usage and tRNA availability); production of a mutant protein comprising a mutation that modifies the activity of the protein; and glycosylation and/or other modifications of the translation product, if required for proper expression and function.

[0086] Components of the circadian clock and genetic modifications in components of the circadian clock are described in Section I(a). Environmental signal sensors and genetic modifications that modify expression of environmental signal sensors are described in Section I(b).

### (a) Circadian Clock

[0087] A modified plant of the instant disclosure comprises a genetic modification of a polynucleotide encoding a component of the circadian clock. The genetic modification modifies a function of the circadian system. In some aspects, the modification that modifies a function of the circadian system comprises a modification of an endogenous polynucleotide sequence encoding a component of the circadian clock.

[0088] In plants, the circadian clock is a complex gene regulatory network of repressors and activators that form multiple interlocking feedback loops (FIG. 1). These clock genes are expressed at specific times of the day, regulate each other's expression, and influence multiple pathways and mechanisms of development, physiology, and metabolism. The circadian clock ensures that a plant is most responsive to light during daylight hours, to growth hormones during the night, and to environmental stresses at times when adverse conditions are most likely. To appropriately regulate plant responses to external factors, the clock is directly linked with the light and temperature-signaling pathways, which also ensures synchronicity between the external and internal rhythms (See Section I(b) herein below). The cross talk between these regulatory pathways also provides seasonal information to the plant, allowing for example the determination of day length for the appropriate control of the transition to flowering.

[0089] A genetic modification of the instant disclosure that modifies a function of the circadian clock can modify any component of the circadian clock. The network of intertwined feedback loops of the plant circadian clock comprises repressor and activator transcription factors among other factors. Levels of these proteins are in constant flux, each peaking at a specific time of day and feeding back to regulate each other's expression. In Arabidopsis, the morning-expressed MYB-like transcription factors CCA1 (CIRCADIAN CLOCK ASSOCIATED1) and LHY (LATE ELOGATED HYPOCOTYL) repress the afternoon expressed PSEUDO-RESPONSE REGULATOR (PRR) genes, including PRR1/TOC1 (TIMING OF CAB EXPRESSION 1), PRR5, PRR7, and PRR9. TOC1, along with the other PRR proteins, in turn, repress the expression of CCA1 and LHY, closing this feedback loop. CCA1/LHY are themselves primarily repressors of transcription and bind to a cis-motif termed the evening element (EE) found in the regulatory regions of many clock genes, including the PRRs. Other direct targets of CCA1/LHY activity include genes that encode members of the transcriptional regulatory evening complex, ELF3 (EARLY FLOWERING3), ELF4, and LUX (LUX ARRHYTHMO). These three genes are expressed at night, at which time the evening complex feeds back to repress multiple morning- and afternoon-expressed genes to complete another feedback loop in the network (FIG. 1).

[0090] The circadian regulatory network in plants also comprises a second set of midday-expressed MYB-like transcription factors, REVEILLE4 (RVE4), RVE6, and RVE8, have been shown to activate expression of several clock genes including TOC1, the PRRs and the evening complex genes. To activate gene expression, RVE8 forms a complex with LNK1 (NIGHT LIGHT-INDUCIBLE AND CLOCK-REGULATED1) and LNK2 and associates with the promoters of TOC1 and PRR5. The RVE activator proteins are not simply a second layer of regulation on top of the core circadian clock but are connected and embedded into the clock regulatory network (FIG. 1). RVE8 expression is repressed by TOC1 and the PRRs, forming yet another negative feedback loop in this network.

[0091] Land plants contain an additional family of LOV UV-A/blue light photoreceptors/clock proteins comprising ZEITLUPE (ztl), FLAVIN-BINDING, KELCH REPEAT, F-BOX (fkf1) and LOV KELCH PROTEIN 2 (Ikp2) proteins (collectively referred to as Zeitlupes). In contrast to the phototropins, Zeitlupes contain a single FMN-binding LOV domain followed by an F-box and six Kelch repeats. As suggested by their domain organization, Zeitlupes form SCF E3 ubiquitin ligase complexes directly controlling light-mediated protein degradation. LOV domains are also found associated with other output domains including DNA binding b-ZIP in aureochromes from photosynthetic stramenopile algae. Therefore, LOV domains are versatile light absorption modules mediating different biochemical outputs.

[0092] ZEITLUPE (ZTL) is unique in being both a component of the plant clock and a blue-light photoreceptor. ZTL interacts directly with GIGANTEA (GI), another clock component, and this interaction is stabilized by blue light via the photosensory LOV domain of ZTL. This ZTL-GI complex can maintain circadian rhythms by influencing the stability of both TOC1 and GI proteins. GI stability is also affected by a second protein complex that includes ELF3 and COP1 (CONSTITUTIVE PHOTOMORPHOGENIC1) that acts downstream from the blue light photoreceptor CRY2. The ELF3-COP1 complex targets GI for degradation and represents yet another point at which light signals are integrated into the circadian clock network. The LNK2 and RVE8 complex also appears to play a role in the integration of the clock and light-signaling pathways (FIG. 2A). It is possible that clock entrainment relies on the induction of LNK expression by phytochromes in conjunction with the early morning expression of CCA1 and LHY.

[0093] A modified plant of the instant disclosure can comprise nucleic acid modifications that modify expression of any protein or factor that functions in the circadian clock of a plant. Accordingly, a modified plant of the instant disclosure can comprise a genetic modification of a polynucleotide encoding an MYB-like transcription factor, a PSEUDO-RESPONSE REGULATOR (PRR) protein, a protein of the evening complex (EC), a zeitlupe protein, or any combination thereof. In some aspects, a modified plant of the instant disclosure comprises a genetic modification of a polynucleotide encoding an MYB-like transcription factor that modifies the expression of the MYB-like transcription factor. In other aspects, a modified plant of the instant disclosure comprises a genetic modification of a polynucleotide encoding a PRR protein that modifies the expression of the MYB-like transcription factor PRR protein. In yet other aspects, a modified plant of the instant disclosure comprises a genetic modification of a polynucleotide encoding a protein of the evening complex that modifies the expression of the protein of the evening complex. In some aspects, a modified plant of the instant disclosure comprises a genetic modification of a zeitlupe protein that modifies the expression of the zeitlupe protein.

[0094] In some aspects, a modified plant of the instant disclosure comprises a genetic modification of a polynucleotide encoding CCA1, LHY, PRR1/TOC1, PRR5, PRR7, PRR9, ELF3, ELF4, LUX, ZTL, FKF1, LKP2, GI, COP1, LNK2, REV4, REV6, RVE8, LNK1, LNK2, TOC1, or any combination thereof. In other aspects, a modified plant of the instant disclosure comprises a genetic modification of a polynucleotide encoding ELF3, ELF4, LUX, or any combination thereof. In some aspects, the modified plant comprises a genetic modification of a polynucleotide encoding ELF4. In some aspects, the modified plant comprises a genetic modification of a polynucleotide encoding LUX.

[0095] In some aspects, the modified plant comprises a genetic modification of a polynucleotide encoding ELF3. In some aspects, a genetic modification of a polynucleotide encoding ELF3 modifies expression of ELF3. In some aspects, a genetic modification of a polynucleotide encoding ELF3 reduces expression of ELF3. Methods of reducing expression of a protein or RNA in a plant are known in the art and include, without limitation, introducing a genetic modification in an endogenous nucleic acid sequence that regulates expression of the protein, introducing a programmable transcription regulation system, or modifying the protein to generate a defective protein. In some aspects, expression of the ELF3 protein is reduced. In some aspects, expression of the ELF3 protein is reduced by introducing into the plant a loss of function mutation in an endogenous polynucleotide expressing ELF3.

[0096] In some aspects, the modified plant is a modified Arabidopsis thaliana (A. thaliana). When the plant is A. thaliana, the polynucleotide encoding ELF3 can comprise a nucleic acid sequence comprising about 75%, 76%, 77%, 78%, 79%, 80%, 81%, 82%, 83%, 84%, 85%, 86%, 87%, 88%, 89%, 90%, 91%, 92%, 93%, 94%, 95%, 96%, 97%, 98%, 99%, or 100% sequence identity with a nucleic acid sequence of SEQ ID NO: 1. In some aspects, the polynucleotide encoding ELF3 comprises a nucleic acid sequence comprising at least about 75% or more, at least about 85% or more, at least about 95% or more, or 100% sequence identity with a nucleic acid sequence of SEQ ID NO: 1. In some aspects, the polynucleotide encoding ELF3 comprises an amino acid sequence comprising about 75%, 76%, 77%, 78%, 79%, 80%, 81%, 82%, 83%, 84%, 85%, 86%, 87%, 88%, 89%, 90%, 91%, 92%, 93%, 94%, 95%, 96%, 97%, 98%, 99%, or 100% sequence identity with an amino acid sequence of SEQ ID NO: 2. In some aspects, the polynucleotide encoding ELF3 comprises an amino acid sequence comprising at least about 75% or more, at least about 85% or more, at least about 95% or more, or 100% sequence identity with an amino acid sequence of SEQ ID NO: 2.

[0097] In some aspects, a modified plant of the instant disclosure comprises a genetic modification of a polynucleotide comprising a loss-of-function mutation in a nucleic acid sequence encoding ELF3. In some aspects, a nucleic acid sequence encoding ELF3 and comprising a loss-of-function mutation comprises about 75%, 76%, 77%, 78%, 79%, 80%, 81%, 82%, 83%, 84%, 85%, 86%, 87%, 88%, 89%, 90%, 91%, 92%, 93%, 94%, 95%, 96%, 97%, 98%, 99%, or 100% sequence identity with a nucleic acid sequence of SEQ ID NO: 3, SEQ ID NO: 4, or a combination thereof. In some aspects, a nucleic acid sequence encoding ELF3 and comprising a loss-of-function mutation comprises about 75% or more, at least about 85% or more, at least about 95% or more, or 100% sequence identity with a nucleic acid sequence of SEQ ID NO: 3, SEQ ID NO: 4, or a combination thereof.

[0098] In some aspects, the modified plant is a modified Thlaspi arvense (T. arvense; pennycress). In some aspects, the polynucleotide encoding ELF3 comprises a nucleic acid sequence comprising about 75%, 76%, 77%, 78%, 79%, 80%, 81%, 82%, 83%, 84%, 85%, 86%, 87%, 88%, 89%, 90%, 91%, 92%, 93%, 94%, 95%, 96%, 97%, 98%, 99%, or 100% sequence identity with a nucleic acid sequence of SEQ ID NO: 20. In some aspects, the polynucleotide encoding ELF3 comprises a nucleic acid sequence comprising at least about 75% or more, at least about 85% or more, at least about 95% or more, or 100% sequence identity with a nucleic acid sequence of SEQ ID NO: 20.

[0099] In some aspects, the polynucleotide encoding ELF3 comprises an amino acid sequence comprising about 75%, 76%, 77%, 78%, 79%, 80%, 81%, 82%, 83%, 84%, 85%, 86%, 87%, 88%, 89%, 90%, 91%, 92%, 93%, 94%, 95%, 96%, 97%, 98%, 99%, or 100% sequence identity with an amino acid sequence of SEQ ID NO: 21. In some aspects, the polynucleotide encoding ELF3 comprises an amino acid sequence comprising at least about 75% or more, at least about 85% or more, at least about 95% or more, or 100% sequence identity with an amino acid sequence of SEQ ID NO: 21.

[0100] In some aspects, a modified plant of the instant disclosure comprises a genetic modification of a polynucleotide comprising a loss-of-function mutation in a nucleic acid sequence encoding ELF3. In some aspects, the genetic modification of the polynucleotide encoding the ELF3 protein comprises a deletion of a nucleic acid segment in the polynucleotide encoding the ELF3 protein, wherein the nucleic acid segment comprises about 75%, 76%, 77%, 78%, 79%, 80%, 81%, 82%, 83%, 84%, 85%, 86%, 87%, 88%, 89%, 90%, 91%, 92%, 93%, 94%, 95%, 96%, 97%, 98%, 99%, or 100% sequence identity with a nucleic acid sequence of SEQ ID NO: 22, a sequence comprising the AGCGCTA nucleic acid sequence, or a combination thereof. In some aspects, the genetic modification of the polynucleotide encoding the ELF3 protein comprises a deletion of a nucleic acid segment in the polynucleotide encoding the ELF3 protein, wherein the nucleic acid segment comprises about 75% or more, at least about 85% or more, at least about 95% or more, or 100% sequence identity with a nucleic acid sequence of SEQ ID NO: 22, a sequence comprising the AGCGCTA nucleic acid sequence, or a combination thereof.

[0101] In some aspects, the genetic modification of the polynucleotide encoding the ELF3 protein comprises a genetic modification introduced by a programmable nucleic acid modification system comprising a CRISPR/Cas nuclease system, wherein the CRISPR/Cas nuclease system comprises a CAS9 protein (dCAS9) and a guide RNA (gRNA). In some aspects, the Cas9 protein is encoded by a a nucleic acid sequence comprising at least about 75%, 76%, 77%, 78%, 79%, 80%, 81%, 82%, 83%, 84%, 85%, 86%, 87%, 88%, 89%, 90%, 91%, 92%, 93%, 94%, 95%, 96%, 97%, 98%, 99%, or 100% sequence identity with a nucleic acid sequence of SEQ ID NO: 29 and the gRNA comprises a nucleic acid sequence of SEQ ID NO: 30, SEQ ID NO: 31, or a combination thereof. In some aspects, the Cas9 protein is encoded by a a nucleic acid sequence comprising at least about 75% or more, at least about 85% or more, at least about 95% or more, or 100% sequence identity with a nucleic acid sequence of SEQ ID NO: 29 and the gRNA comprises a nucleic acid sequence of SEQ ID NO: 30, SEQ ID NO: 31, or a combination thereof.

[0102] In some aspects, the modified plant is a modified basil plant. In some aspects, the polynucleotide encoding ELF3 comprises a nucleic acid sequence comprising about 75%, 76%, 77%, 78%, 79%, 80%, 81%, 82%, 83%, 84%, 85%, 86%, 87%, 88%, 89%, 90%, 91%, 92%, 93%, 94%, 95%, 96%, 97%, 98%, 99%, or 100% sequence identity with a nucleic acid sequence of SEQ ID NO: 13. In some aspects, the polynucleotide encoding ELF3 comprises a nucleic acid sequence comprising at least about 75% or more, at least about 85% or more, at least about 95% or more, or 100% sequence identity with a nucleic acid sequence of SEQ ID NO: 13.

[0103] In some aspects, the genetic modification of the polynucleotide encoding the ELF3 protein comprises a genetic modification introduced by a programmable nucleic acid modification system comprising a CRISPR/Cas nuclease system, wherein the CRISPR/Cas nuclease system comprises a CAS9 protein (dCAS9) and a guide RNA (gRNA). In some aspects, the Cas9 protein is encoded by a nucleic acid sequence comprising at least about 75%, 76%, 77%, 78%, 79%, 80%, 81%, 82%, 83%, 84%, 85%, 86%, 87%, 88%, 89%, 90%, 91%, 92%, 93%, 94%, 95%, 96%, 97%, 98%, 99%, or 100% sequence identity with a nucleic acid sequence of SEQ ID NO: 29 and the gRNA comprises a nucleic acid sequence of SEQ ID NOs: 33-36, or any combination thereof. In some aspects, the Cas9 protein is encoded by a nucleic acid sequence comprising at least about 75% or more, at least about 85% or more, at least about 95% or more, or 100% sequence identity with a nucleic acid sequence of SEQ ID NO: 29 and the gRNA comprises a nucleic acid sequence of SEQ ID NOs: 33-36, or any combination thereof.

### (b) Environmental Signal

[0104] A modified plant of the instant disclosure comprises a genetic modification of a polynucleotide encoding a component of the circadian clock. The genetic modification of the polynucleotide encoding a component of the circadian clock modifies the ability of a plant to receive environmental signal, respond to a received environmental signal, or both. In some aspects, a genetic modification of the polynucleotide encoding a component of the circadian clock modifies expression of the environmental signal sensor. In some aspects, the modification of a polynucleotide encoding a component of the circadian clock comprises a modification of an endogenous polynucleotide sequence encoding an environmental signal sensor. In some aspects, modification of the endogenous polynucleotide encoding the environmental signal sensor modifies expression of the environmental signal sensor. In some aspects, the modification of a polynucleotide encoding a component of the circadian clock comprises an introduced exogenous polynucleotide sequence encoding an environmental signal sensor. In some aspects, the introduced exogenous polynucleotide sequence encoding an environmental signal sensor modifies expression of the environmental signal sensor.

[0105] Circadian clocks must be continually adjusted by environmental cues so that the processes they control are appropriately timed even as temperature, day-length, and other environmental cues change throughout the life of the plant. Non-limiting examples of environmental signals that can influence the circadian clock include photoperiod, light intensity and quality, temperature, chemicals, gravity, moisture, biotic or abiotic stress, oxygen and carbon dioxide concentrations, carbohydrate availability, or any combination thereof.

[0106] The plant clock uses multiple mechanisms to sense and integrate external environmental signals into the feedback loops described above (FIG. 2A-B). Non-limiting examples of environmental signal sensors through which plants sense and communicate the environmental signal to the circadian clock include photoreceptors, temperature sensors, CO₂ sensors, O₂ sensors, ethylene sensors, gravitropic sensors, or any combination thereof. Accordingly, a modified plant of the instant disclosure can comprise a genetic modification of a polynucleotide encoding one or more of a photoreceptor, a temperature sensor, or any combination thereof.

### A. Photoreceptors

[0107] In some aspects, a modified plant of the instant disclosure comprises a genetic modification of a polynucleotide encoding a photoreceptor, wherein the nucleic acid modification modifies the expression of the photoreceptor and the response of the plant to changes in photoperiod, intensity, and quality, or any combination thereof. Photoreceptors can sense environmental cues, such as irradiance, day-night transition, photoperiods, and light quality. Non-limiting examples of photoreceptors include phytochromes, phototropins, cryptochromes, F-box containing Flavin binding proteins (e.g., ZEITLUPE, FKF1/LKP2), UV-B resistance 8 (UVR8), or any combination thereof.

[0108] In some aspects, a modified plant of the instant disclosure comprises a genetic modification of a polynucleotide encoding a phototropin. Phototropins are photoreceptor proteins (more specifically, flavoproteins) that mediate phototropism responses in higher plants. Phototropins can be important for the opening of stomata and the movement of chloroplasts. These blue light receptors are seen across the entire green plant lineage. Phototropins are part of the phototropic sensory system in plants that causes various environmental responses in plants. Phototropins specifically will cause stems to bend towards light and stomata to open. Phototropins have been shown to impact the movement of chloroplast inside the cell. In addition, phototropins mediate the first changes in stem elongation in blue light prior to cryptochrome activation. Phototropins are also required for blue light mediated transcript destabilization of specific mRNAs in the cell. Non-limiting examples of phototropins include PHOT1 and PHOT2, or any combination thereof. In some aspects, a modified plant of the instant disclosure comprises a genetic modification of a polynucleotide encoding PHOT1 that modifies the expression of PHOT1. In some aspects, a modified plant of the instant disclosure comprises a genetic modification of a polynucleotide encoding PHOT2 that modifies the expression of PHOT2.

[0109] In some aspects, a modified plant of the instant disclosure comprises a genetic modification of a polynucleotide encoding a cryptochrome, wherein the nucleic acid modification modifies the expression of the cryptochrome. Cryptochromes (CRY) are UV-A/blue photoreceptors ubiquitously found in bacteria, fungi, animals, and plants sharing a common evolutionary ancestor with DNA photolyases. Cryptochromes regulate growth and development in plants and the circadian clock in plants and animals. The Arabidopsis genome encodes three cryptochrome genes, CRY1, CRY2, and CRY3. CRY1 and CRY2 act primarily in the nucleus, whereas CRY3 likely functions in chloroplasts and mitochondria. Arabidopsis CRY1 and CRY2 mediate primarily blue light regulation of de-etiolation and photoperiodic control of flowering, respectively. In addition, these two photoreceptors regulate other aspects of plant growth and development, including entrainment of the circadian clock, guard cell development and stomatal opening, root growth, plant height, fruit and ovule size, tropic growth, apical dominance, apical meristem activity, programmed cell death, the high-light stress response, osmotic stress response, shade avoidance, and responses to bacterial and viral pathogens. Arabidopsis CRY3 belongs to the CRY-DASH clade of the photolyase/cryptochrome superfamily, and it is known to act as a single-stranded DNA repairing enzyme. However, CRY-DASH of some organisms have been reported to possess both DNA-repairing enzyme activity and photosensory activity. Arabidopsis CRY3 can also act as a dual function photoreceptor in mitochondria and chloroplasts. In some aspects, a modified plant of the instant disclosure comprises a genetic modification of a polynucleotide encoding CRY1 that modifies the expression of CRY1. In some aspects, a modified plant of the instant disclosure comprises a genetic modification of a polynucleotide encoding CRY2 that modifies the expression of CRY2. In some aspects, a modified plant of the instant disclosure comprises a genetic modification of a polynucleotide encoding CRY3 that modifies the expression of CRY3.

[0110] In some aspects, a modified plant of the instant disclosure comprises a genetic modification of a polynucleotide encoding a ZEITLUPE (ZTL) protein that modifies the expression of zeitlupe protein. Zeitlupes can be as described in Section 1(a) herein above.

[0111] In some aspects, a modified plant of the instant disclosure comprises a genetic modification of a polynucleotide encoding a UVR8 protein that modifies the expression of the phytochrome UVR8 protein. UVR8 is a UV-B—sensing protein found in plants. It is responsible for sensing ultraviolet light in the range 280-315 nm and initiating the plant stress response. UVR8 has also been shown to be functionally linked with the circadian clock in plants.

[0112] In some aspects, a modified plant of the instant disclosure comprises a genetic modification of a polynucleotide encoding a phytochrome that modifies the expression of the phytochrome. The phytochrome-signaling pathway is one of the main mechanisms through which plants sense and respond to changes in red light availability and is directly linked to the clock regulatory network. Phytochromes (phys) are the primary red and far-red light photoreceptors in plants and consist of a five-member protein family in Arabidopsis; PhyA, PhyB, PhyC, PhyD, and PhyE. Phys reversibly switch between Pr and Ptr forms upon absorption of red or far-red light, respectively, and the ratio of these forms within the cell controls the shade avoidance response and contributes to light perception. PhyA is the most divergent phy, with a specialized role as a far-red light sensor, whereas phyB is the predominant red light sensor in Arabidopsis. Although oscillation of circadian transcripts is dampened under constant far-red light, phyA retains photoregulatory control of these and other genes under these conditions. By contrast, phyA, phyB, phyC, and phyD each appear to contribute to maintenance of circadian rhythms under constant red light. PhyD single mutants have a wild-type circadian phenotype but have an additive effect when introgressed into a phyB background.

[0113] Of the phytochrome receptors, phytochrome B (phyB) is the main red-light receptor and its effects on plant growth and development have been extensively studied. PhyB photoconverts from an inactive form (Pr) to an active form (Pfr) on absorption of red light. Pfr interacts with the PHYTOCHROME-INTERACTING FACTORS (PIFs) and targets these transcription factors for degradation during the day to limit cell elongation to the nighttime hours. PIF proteins have been established as transcriptional regulators of morning expressed LHY and CCA1, directly linking the light and clock regulatory networks. Recently, PIFs have also been shown to mediate metabolic signals to the circadian oscillator. Another link between the clock- and light-signaling pathways occurs via interactions between phyB and the evening complex protein ELF3. ELF3 also binds to PIF4 independently of the other evening complex components to repress PIF4 function, thus regulating a light-signaling component controlling hypocotyl elongation. Similarly, TOC1 and other PRR proteins have been shown to bind directly to PIF3 and PIF4 and inhibit their ability to activate transcription. Thus, the association of PRR factors with PIFs on the G-box elements of target promoters serves to limit PIF transactivation function to the predawn hours. The PRRs and the evening complex have also been shown to regulate transcription of PIF genes. Thus, both ELF3 and the PRR proteins limit the function and expression of the important growth regulatory PIF factors and provide further links between clock and light regulation of growth (FIG. 2A).

[0114] Accordingly, a modified plant of the instant disclosure can comprise a genetic modification of a polynucleotide encoding one or more of phyA, phyB, phyC, phyD, phyE, a PIF protein, or any combination thereof. In some aspects, a modified plant of the instant disclosure comprises a genetic modification of a polynucleotide encoding phyA. In some aspects, a modified plant of the instant disclosure comprises a genetic modification of a polynucleotide encoding phyC. In some aspects, a modified plant of the instant disclosure comprises a genetic modification of a polynucleotide encoding phyD. In some aspects, a modified plant of the instant disclosure comprises a genetic modification of a polynucleotide encoding phyE.

[0115] In some aspects, a modified plant of the instant disclosure comprises a genetic modification of a polynucleotide encoding PhyB. In some aspects, the genetic modification of the polynucleotide encoding the PhyB photoreceptor modifies expression of the PhyB photoreceptor. In some aspects, the polynucleotide encoding PhyB comprises a nucleic acid sequence comprising about 75%, 76%, 77%, 78%, 79%, 80%, 81%, 82%, 83%, 84%, 85%, 86%, 87%, 88%, 89%, 90%, 91%, 92%, 93%, 94%, 95%, 96%, 97%, 98%, 99%, or 100% sequence identity with a nucleic acid sequence of SEQ ID NO: 5 or SEQ ID NO: 27. In some aspects, the polynucleotide encoding PhyB comprises a nucleic acid sequence comprising at least about 75% or more, at least about 85% or more, at least about 95% or more, or 100% sequence identity with a nucleic acid sequence of SEQ ID NO: 5 or SEQ ID NO: 27. In some aspects, the polynucleotide encoding PhyB comprises an amino acid sequence comprising about 75%, 76%, 77%, 78%, 79%, 80%, 81%, 82%, 83%, 84%, 85%, 86%, 87%, 88%, 89%, 90%, 91%, 92%, 93%, 94%, 95%, 96%, 97%, 98%, 99%, or 100% sequence identity with an amino acid sequence of SEQ ID NO: 6 or SEQ ID NO: 28. In some aspects, the polynucleotide encoding PhyB comprises an amino acid sequence comprising at least about 75% or more, at least about 85% or more, at least about 95% or more, or 100% sequence identity with a nucleic acid sequence of SEQ ID NO: 6 or SEQ ID NO: 28.

[0116] In some aspects, a genetic modification of a polynucleotide encoding PhyB increases expression of PhyB. For instance, a genetic modification can increase expression of PhyB by, without limitation, overexpressing PhyB, constitutively expressing PhyB, expressing a constitutively active PhyB photoreceptor, or any combination thereof. In some aspects, a genetic modification can increase expression of PhyB by overexpressing PhyB. Methods of overexpressing a protein or RNA in a plant are known in the art and include, without limitation, introducing an expression construct expressing the protein to thereby generate a modified plant comprising multiple copies of the polypeptide encoding the protein, introducing an expression construct expressing the protein under the control of a constitutive promoter, introducing a genetic modification in an endogenous nucleic acid sequence that regulates expression of the protein, introducing a programmable transcription regulation system, or modifying the protein to generate a constitutively active protein. In some aspects, the phytochrome B photoreceptor is overexpressed, constitutively expressed, or constitutively active, or any combination thereof. In some aspects, the phytochrome B receptor is overexpressed, constitutively expressed, and constitutively active.

[0117] In some aspects, a genetic modification of a polynucleotide encoding a phyB photoreceptor encodes a constitutively active phyB photoreceptor. In some aspects, a genetic modification of a polynucleotide encoding a phyB photoreceptor encodes a constitutively expressed and constitutively active phyB photoreceptor.

[0118] The constitutively active phyB photoreceptor can be encoded by a polynucleotide comprising at least about 75%, 76%, 77%, 78%, 79%, 80%, 81%, 82%, 83%, 84%, 85%, 86%, 87%, 88%, 89%, 90%, 91%, 92%, 93%, 94%, 95%, 96%, 97%, 98%, 99%, or 100% sequence identity with a nucleic acid sequence of SEQ ID NO: 7, SEQ ID NO: 11, SEQ ID NO: 25, or any combination thereof. In some aspects, the constitutively active phyB photoreceptor is encoded by a polynucleotide comprising at least about 75% or more, at least about 85% or more, at least about 95% or more, or 100% sequence identity with a nucleic acid sequence of SEQ ID NO: 7, SEQ ID NO: 11, SEQ ID NO: 25, or any combination thereof. The constitutively active phyB photoreceptor can comprise an amino acid sequence comprising at least about 75%, 76%, 77%, 78%, 79%, 80%, 81%, 82%, 83%, 84%, 85%, 86%, 87%, 88%, 89%, 90%, 91%, 92%, 93%, 94%, 95%, 96%, 97%, 98%, 99%, or 100% sequence identity with an amino acid sequence of SEQ ID NO: 8 SEQ ID NO: 12, SEQ ID NO: 26, or any combination thereof. In some aspects, the constitutively active phyB photoreceptor comprises an amino acid sequence comprising at least about 75% or more, at least about 85% or more, at least about 95% or more, or 100% sequence identity with an amino acid sequence of SEQ ID NO: 8 SEQ ID NO: 12, SEQ ID NO: 26, or any combination thereof.

[0119] In some aspects, the modified plant is a modified A. thaliana. When the plant is A. thaliana, the plant can comprise a genetic modification of a polynucleotide encoding a phyB photoreceptor comprising a modified activity. In some aspects, a modified plant of the instant disclosure comprises a genetic modification of a polynucleotide encoding a constitutively active phyB photoreceptor. In some aspects, the constitutively active phyB photoreceptor is YHB and is encoded by a nucleic acid sequence comprising about 75%, 76%, 77%, 78%, 79%, 80%, 81%, 82%, 83%, 84%, 85%, 86%, 87%, 88%, 89%, 90%, 91%, 92%, 93%, 94%, 95%, 96%, 97%, 98%, 99%, or 100% sequence identity with a nucleic acid sequence of SEQ ID NO: 7, SEQ ID NO: 11, SEQ ID NO: 25, or any combination thereof. In some aspects, the constitutively active phyB photoreceptor is YHB and is encoded by a nucleic acid sequence comprising about 75% or more, at least about 85% or more, at least about 95% or more, or 100% sequence identity with a nucleic acid sequence of SEQ ID NO: 7, SEQ ID NO: 11, SEQ ID NO: 25, SEQ ID NO: 27, or any combination thereof. In some aspects, the amino acid sequence of the constitutively active YHB comprises about 75%, 76%, 77%, 78%, 79%, 80%, 81%, 82%, 83%, 84%, 85%, 86%, 87%, 88%, 89%, 90%, 91%, 92%, 93%, 94%, 95%, 96%, 97%, 98%, 99%, or 100% sequence identity with an amino acid sequence of SEQ ID NO: 8 SEQ ID NO: 12, SEQ ID NO: 26, or any combination thereof. In some aspects, the amino acid sequence of YHB comprises about 75% or more, at least about 85% or more, at least about 95% or more, or 100% sequence identity with an amino acid sequence of SEQ ID NO: 8 SEQ ID NO: 12, SEQ ID NO: 26, or any combination thereof.

[0120] In some aspects, a modified plant of the instant disclosure comprises a genetic modification of a polynucleotide encoding a phyB photoreceptor comprising a modified activity. In some aspects, a modified plant of the instant disclosure comprises a genetic modification of a polynucleotide encoding a constitutively active phyB photoreceptor. In some aspects, the constitutively active phyB photoreceptor is YHB and is encoded by a nucleic acid sequence comprising about 75%, 76%, 77%, 78%, 79%, 80%, 81%, 82%, 83%, 84%, 85%, 86%, 87%, 88%, 89%, 90%, 91%, 92%, 93%, 94%, 95%, 96%, 97%, 98%, 99%, or 100% sequence identity with a nucleic acid sequence of SEQ ID NO: 7, SEQ ID NO: 11, or a combination thereof. In some aspects, the constitutively active phyB photoreceptor is YHB and is encoded by a nucleic acid sequence comprising about 75% or more, at least about 85% or more, at least about 95% or more, or 100% sequence identity with a nucleic acid sequence of SEQ ID NO: 7, SEQ ID NO: 11, or a combination thereof. In some aspects, the amino acid sequence of the constitutively active YHB comprises about 75%, 76%, 77%, 78%, 79%, 80%, 81%, 82%, 83%, 84%, 85%, 86%, 87%, 88%, 89%, 90%, 91%, 92%, 93%, 94%, 95%, 96%, 97%, 98%, 99%, or 100% sequence identity with an amino acid sequence of SEQ ID NO: 8 SEQ ID NO: 12, or a combination thereof. In some aspects, the amino acid sequence of YHB comprises about 75% or more, at least about 85% or more, at least about 95% or more, or 100% sequence identity with an amino acid sequence of SEQ ID NO: 8 SEQ ID NO: 12, or a combination thereof.

[0121] In some aspects, the modified plant is a modified T. arvense. In some aspects, the modified plant is Thlaspi arvensis (T. arvensis). In some aspects, the modified T. arvensis plant comprises a genetic modification of a polynucleotide encoding PhyB, wherein the polynucleotide comprising the genetic modification encodes a constitutively active PhyB photoreceptor.

[0122] In some aspects, the constitutively active PhyB photoreceptor comprises an amino acid sequence comprising at least about 75%, 76%, 77%, 78%, 79%, 80%, 81%, 82%, 83%, 84%, 85%, 86%, 87%, 88%, 89%, 90%, 91%, 92%, 93%, 94%, 95%, 96%, 97%, 98%, 99%, or 100% sequence identity with an amino acid sequence of SEQ ID NO: 8 SEQ ID NO: 12, SEQ ID NO: 26, or any combination thereof. In some aspects, the constitutively active PhyB photoreceptor comprises an amino acid sequence comprising at least about 75% or more, at least about 85% or more, at least about 95% or more, or 100% sequence identity with an amino acid sequence of SEQ ID NO: 8 SEQ ID NO: 12, SEQ ID NO: 26, or any combination thereof.

[0123] In some aspects, the constitutively active PhyB photoreceptor is encoded by a nucleic acid sequence comprising at least about 75%, 76%, 77%, 78%, 79%, 80%, 81%, 82%, 83%, 84%, 85%, 86%, 87%, 88%, 89%, 90%, 91%, 92%, 93%, 94%, 95%, 96%, 97%, 98%, 99%, or 100% sequence identity with an amino acid sequence of SEQ ID NO: 7, SEQ ID NO: 11, SEQ ID NO: 25, or any combination thereof. In some aspects, the constitutively active PhyB photoreceptor is encoded by a nucleic acid sequence comprising at least about 75% or more, at least about 85% or more, at least about 95% or more, or 100% sequence identity with an amino acid sequence of SEQ ID NO: 7, SEQ ID NO: 11, SEQ ID NO: 25, or any combination thereof.

[0124] In some aspects, the constitutively active PhyB photoreceptor comprises an amino acid sequence comprising at least about 75%, 76%, 77%, 78%, 79%, 80%, 81%, 82%, 83%, 84%, 85%, 86%, 87%, 88%, 89%, 90%, 91%, 92%, 93%, 94%, 95%, 96%, 97%, 98%, 99%, or 100% sequence identity with an amino acid sequence of SEQ ID NO: 26. In some aspects, the constitutively active PhyB photoreceptor comprises an amino acid sequence comprising at least about 75% or more, at least about 85% or more, at least about 95% or more, or 100% sequence identity with an amino acid sequence of SEQ ID NO: 26.

[0125] In some aspects, the constitutively active PhyB photoreceptor is encoded by a nucleic acid sequence comprising at least about 75%, 76%, 77%, 78%, 79%, 80%, 81%, 82%, 83%, 84%, 85%, 86%, 87%, 88%, 89%, 90%, 91%, 92%, 93%, 94%, 95%, 96%, 97%, 98%, 99%, or 100% sequence identity with an amino acid sequence of SEQ ID NO: 25. In some aspects, the constitutively active PhyB photoreceptor is encoded by a nucleic acid sequence comprising at least about 75% or more, at least about 85% or more, at least about 95% or more, or 100% sequence identity with an amino acid sequence of SEQ ID NO: 25.

### B. Temperature Sensors

[0126] Temperature is another environmental signal that is integrated into the clock network (FIG. 2B). Accordingly, a modified plant of the instant disclosure can comprise a modified response to temperature changes.

[0127] A temperature sensor can be a photoreceptor as plant photoreceptors can also function as temperature receptors. One such receptor is phyB, with the rate of reversion from the active Pfr form to the inactive Pr form increasing at higher temperatures.

[0128] In some aspects, a modified plant of the instant disclosure comprising a modified response to temperature changes comprises a genetic modification in a polynucleotide encoding a phyB protein that modifies the activity of the phyB protein, thereby modifying the response of the modified plant to temperature changes. In some aspects, a modified plant of the instant disclosure comprises a genetic modification of a polynucleotide encoding a phyB photoreceptor comprising a modified activity. In some aspects, a modified plant of the instant disclosure comprises a genetic modification of a polynucleotide encoding a constitutively active phyB photoreceptor. PhyB photoreceptors, genetic modifications of polynucleotides encoding PhyB photoreceptors, and modified plants comprising the polynucleotides can be as described in Section I(b)(A) herein above.

[0129] PIF4 has also been shown to respond to changes in temperature to alter plant development and morphology. Because degradation of PIF4 is promoted by Pfr, the increased rate of Pfr to Pr reversion at higher temperatures may account for the warm temperature-induced posttranscriptional accumulation of PIF4 protein. Accordingly, a modified plant of the instant disclosure comprising a modified response to temperature changes can comprise a genetic modification in a polynucleotide encoding a PIF4 protein that modifies the expression of the PIF4 protein thereby modifying the response of the modified plant to temperature changes.

[0130] Temperature has also been shown to regulate the activity of the evening complex. At higher temperatures, association of ELF3 with target promoters is reduced. Thus, in warm conditions, evening-complex mediated repression of targets such as the clock genes PRR7, PRR9, GI, LUX, and the growth regulating PIF4 is relieved, leading to elevated levels of these transcripts during warm nights. Integration of cold temperature cues into the clock network can occur via CBF1/DREB1a (COLD-INDUCIBLE C-REPEAT/DROUGHT-RESPONSIVE ELEMENT-BINDING FACTOR). CBF1 expression is highly induced by cold, and this factor has been shown to bind directly to the promoter of the evening complex component LUX and promote its high-amplitude rhythmic expression at cold temperatures. Intriguingly, phyB and PIF proteins have been reported to repress CBF1 expression, suggesting links between distinct temperature-sensing pathways. Finally, expression of CBF1 is regulated by a number of clock components including the PRRs, the evening complex, and CCA1/LHY, providing yet another example of the ubiquitous feedback loops found in the circadian system. Accordingly, a modified plant of the instant disclosure comprising a modified response to temperature changes can comprise a genetic modification in a polynucleotide encoding any of the above cited proteins thereby modifying the response of the modified plant to temperature changes.

### (c) Genetically Modified Plants

[0131] As sessile organisms, plants are unable to seek out environmental conditions optimal for their growth and development. Instead, plants rely on their remarkable developmental plasticity to adapt to their environment throughout the life of the plant. By integrating environmental information into the regulation of growth and developmental processes, plant can modulate growth and development according to the environment in which the plant is growing. In this way, the final morphology of the plant depends on the environment, defining it as plastic. Plant development starts with a seedling lacking most species-specific characteristics of the adult as a result of plant embryogenesis. Spreading developmental decisions throughout the life cycle provides the opportunity to integrate environmental information into the regulation of these growth and developmental processes, to thereby tune body form and function to the changing environment. For instance, when faced with a spell of unusually elevated temperatures before or during flower initiation and/or development, a plant may respond by reducing the number of flowers or seeds in anticipation of further scarcity of resources.

[0132] While this is advantageous in natural conditions where resources and environmental stresses vary across seasons, location, and in response to unusual weather patterns, plasticity can be disadvantageous under cultivated conditions, resulting in art least reduced yields. In modern crop monoculture, plants are grown under intensive agricultural practices, a plant may not need to adjust in anticipation of harsh conditions as the plant is provided with sufficient resources. In at least that sense, plants with reduced plasticity such as plants of the instant disclosure are well suited for intensive, precision outdoor farming, TCEA, and/or vertical farming). For instance, in one aspect, the modified plants of the instant disclosure flower consistently and uniformly regardless of differences in day length, at varied latitudes, in the face of climate change, increasing temperatures and disrupting weather patterns, or any combination thereof. Importantly, genetically modified plants of the instant disclosure comprising the combination of modifications can provide beneficial agronomic traits without any of the deleterious effects that can be associated with each genetic modification individually. For instance, plants comprising a constitutively active phyB photoreceptor when combined with a loss-of-function mutation in an ELF3 gene is not etiolated (a phenotype of a loss-of-function mutation in an ELF3 gene without a constitutively active phyB) and can flower earlier than plants comprising either mutation alone.

[0133] Plants of the instant disclosure comprise genetic modifications that modify expression of a component of the circadian clock and expression of an environmental signal sensing function. A genetic modification that modifies expression of a component of the circadian clock can results in a modification of a circadian function. A circadian function can be any developmental, physiological, and/or metabolic function that could be affected by the circadian clock. Non-limiting examples of circadian functions include transitions from shoot elongation, regulation of root gravitropism, altered flowering time, growth cessation of leaves, and timing of germination, the synthesis of chlorophyll, de-etiolation (when a seedling emerges into the light and starts its photo-autotrophic life style), stomata development, transition to flowering, senescence, shade avoidance, elongation of seedlings, size, shape, number, and movement of leaves, and the timing of flowering in adult plants.

[0134] Further the resulting plants exhibit agronomic traits beneficial for crop production using modern agricultural practices. Non-limiting examples of beneficial or desirable agronomic traits include accelerated or delayed flowering, consistent flowering, seed quality, seed protein content, seed protein composition, seed oil content, seed oil composition, yield, seed set, response to photoperiod, abiotic stress tolerance, biotic stress tolerance, flowering time and maturity, regulation of circadian clock light response-related flowering, high latitude adaptation, earlier flowering, reduced cellular elongation response to increasing temperature, a uniform time of flowering, consistent secondary metabolite production or any combination thereof. The genetic modifications can stabilize the production of valuable metabolites, compounds, and proteins by reducing fluctuations in metabolism and protein synthesis in plants that produce such molecules for chemistry and pharmaceutical uses. The genetic modifications can reduce temperature-induced architectural changes in plant height, petiole, internode, and organ elongation, allowing plants to maintain their ideotype under temperature changes. The genetic modifications can reduce responsiveness to reduced light quality and shade conditions, preventing unnecessary elongation and competition with neighboring plants.

[0135] In some aspects, modified plants of the instant disclosure comprise a genetic modification of a polynucleotide encoding a component of the circadian clock that modifies expression of the component of the circadian clock; and a genetic modification of a polynucleotide encoding an environmental signal sensor that modifies expression of the environmental signal sensor. The modified expression of the component of the circadian clock and the modified expression of the environmental signal sensor causes the plant to have reduced developmental plasticity in response to changes in environmental conditions during growth and modified circadian function. In some aspects, the component of the circadian clock comprising modified expression is an ELF3 protein and the environmental signal sensor is a PhyB photoreceptor. In some aspects, when the component of the circadian clock comprising modified expression is an ELF3 protein and the environmental signal sensor is a PhyB photoreceptor, the modified plant of the instant disclosure comprises a polynucleotide encoding an ELF3 protein wherein the polynucleotide encoding the ELF3 protein comprises an ELF3 loss-of-function mutation and a polynucleotide encoding a constitutively active PhyB photoreceptor. ELF3 proteins, PhyB photoreceptors, polynucleotides encoding the ELF3 proteins and PhyB photoreceptors, genetic modifications of polynucleotides encoding the ELF3 proteins and PhyB photoreceptors, and modified plants comprising the modified polynucleotides can be as described in Sections I(a) and I(b) herein above.

[0136] In some aspects, a modified plant of the instant disclosure is A. thaliana. When the modified plant is A. thaliana, the plant can comprise a polynucleotide comprising an ELF3 loss-of-function mutation, wherein the polynucleotide comprises a nucleic acid sequence comprising at least about 75%, 76%, 77%, 78%, 79%, 80%, 81%, 82%, 83%, 84%, 85%, 86%, 87%, 88%, 89%, 90%, 91%, 92%, 93%, 94%, 95%, 96%, 97%, 98%, 99%, or 100% sequence identity with an amino acid sequence of SEQ ID NO: 3 (elf3-1), SEQ ID NO: 4 (elf3-2), or a combination thereof. In some aspects, the polynucleotide comprises a nucleic acid sequence comprising at least about 75% or more, at least about 85% or more, at least about 95% or more, or 100% sequence identity with an amino acid sequence of SEQ ID NO: 3 (elf3-1), SEQ ID NO: 4 (elf3-2), or a combination thereof. Further, when the modified plant is A. thaliana, the plant can comprise a polynucleotide encoding a constitutively active PhyB photoreceptor, wherein the polynucleotide comprises a nucleic acid sequence comprising at least about 75%, 76%, 77%, 78%, 79%, 80%, 81%, 82%, 83%, 84%, 85%, 86%, 87%, 88%, 89%, 90%, 91%, 92%, 93%, 94%, 95%, 96%, 97%, 98%, 99%, or 100% sequence identity with an amino acid sequence SEQ ID NO: 7, SEQ ID NO: 11, or a combination thereof. In some aspects, the polynucleotide comprises a nucleic acid sequence comprising at least about 75% or more, at least about 85% or more, at least about 95% or more, or 100% sequence identity with an amino acid sequence of SEQ ID NO: 7, SEQ ID NO: 11, or a combination thereof. Additionally, when the modified plant is A. thaliana, the plant can comprise a polynucleotide encoding a constitutively active PhyB photoreceptor, wherein the polynucleotide comprises a nucleic acid sequence comprising at least about 75%, 76%, 77%, 78%, 79%, 80%, 81%, 82%, 83%, 84%, 85%, 86%, 87%, 88%, 89%, 90%, 91%, 92%, 93%, 94%, 95%, 96%, 97%, 98%, 99%, or 100% sequence identity with an amino acid sequence SEQ ID NO: 7. In some aspects, the polynucleotide comprises a nucleic acid sequence comprising at least about 75% or more, at least about 85% or more, at least about 95% or more, or 100% sequence identity with an amino acid sequence of SEQ ID NO: 7.

[0137] In some aspects, a modified plant of the instant disclosure is T. arvensis. When the modified plant is T. arvensis, the plant can comprise a polynucleotide comprising an ELF3 loss-of-function mutation, wherein the polynucleotide comprises a nucleic acid sequence comprising at least about 75%, 76%, 77%, 78%, 79%, 80%, 81%, 82%, 83%, 84%, 85%, 86%, 87%, 88%, 89%, 90%, 91%, 92%, 93%, 94%, 95%, 96%, 97%, 98%, 99%, or 100% sequence identity with an amino acid sequence of SEQ ID NO: 22, a sequence comprising the AGCGCTA nucleic acid sequence, or a combination thereof. In some aspects, the polynucleotide comprises a nucleic acid sequence comprising at least about 75% or more, at least about 85% or more, at least about 95% or more, or 100% sequence identity with an amino acid sequence of SEQ ID NO: 22, a sequence comprising the AGCGCTA nucleic acid sequence, or a combination thereof. Further, when the modified plant is T. arvensis, the plant can comprise a polynucleotide encoding a constitutively active PhyB photoreceptor, wherein the polynucleotide comprises a nucleic acid sequence comprising at least about 75%, 76%, 77%, 78%, 79%, 80%, 81%, 82%, 83%, 84%, 85%, 86%, 87%, 88%, 89%, 90%, 91%, 92%, 93%, 94%, 95%, 96%, 97%, 98%, 99%, or 100% sequence identity with an amino acid sequence SEQ ID NO: 25, SEQ ID NO: 27, or a combination thereof. In some aspects, the polynucleotide comprises a nucleic acid sequence comprising at least about 75% or more, at least about 85% or more, at least about 95% or more, or 100% sequence identity with an amino acid sequence of SEQ ID NO: 25, SEQ ID NO: 27, or a combination thereof.

### II. Engineered Nucleic Acid Modification System

[0138] One aspect of the present disclosure encompasses a system for modifying an environmental signal sensor in a plant. Non-limiting examples of suitable systems for modifying an environmental signal sensor in a plant include programmable nucleic acid modification systems, an expression constructs comprising a promoter operably linked to a polynucleotide encoding a polypeptide or polynucleotide, or any combination thereof. In some aspects, the system comprises a nucleic acid construct comprising at least one or both of a programmable nucleic acid modification system comprising a targeting nucleic acid sequence targeting a nucleic acid sequence in a polynucleotide sequence encoding a component of the circadian clock; and an expression construct comprising a promoter operably linked to a polynucleotide encoding a polynucleotide encoding an environmental signal sensor. The programmable nucleic acid modification system introduces a loss of function mutation into the polynucleotide sequence encoding the component of the circadian clock, and the expression construct comprising a promoter operably linked to a polynucleotide encoding a polynucleotide encoding an environmental signal sensor increases expression of the environmental signal sensor, thereby causing the plant to exhibit reduced developmental plasticity in response to changes in environmental conditions during growth, and modified circadian function.

[0139] In some aspects, the nucleic acid modification system is an expression construct comprising a promoter operably linked to a polynucleotide encoding a component of the circadian clock, an expression construct comprising a promoter operably linked to a polynucleotide encoding an environmental signal sensor, or a combination thereof. In some aspects, the nucleic acid modification system is an expression construct comprising a promoter operably linked to a polynucleotide encoding an environmental signal sensor. Environmental signal sensors, polynucleotides encoding the environmental signal sensors, genetic modifications of polynucleotides encoding the environmental signal sensors, and modified plants comprising the modified polynucleotides can be as described in Section I(b) herein above. Expression constructs can be as described in Section III herein below.

[0140] In other aspects, the nucleic acid modification system is a programmable nucleic acid modification system targeted to a nucleic acid sequence in a polynucleotide encoding a component of the circadian clock, encoding an environmental signal sensor, or a combination thereof. In some aspects, the expression construct comprising a promoter operably linked to a polynucleotide encoding a polynucleotide encoding an environmental signal sensor increases expression of the environmental signal sensor. Programmable nucleic acid modification systems are described in Section II(a) herein below.

### (a) Programmable Nucleic Acid Modification Systems

[0141] As used herein, a “programmable nucleic acid modification system” is a system capable of targeting a nucleic acid sequence in a polynucleotide and modifying the nucleic acid sequence of the polynucleotide or modifying the expression of the polynucleotide. Accordingly, a programmable nucleic acid modification system can be used to alter a polynucleotide or to alter a protein encoded by the nucleic acid sequence. A programmable nucleic acid modification system can also be used to modify the expression of a nucleic acid sequence encoded by the polynucleotide or modify the expression of a polypeptide encoded by the polynucleotide. In the context of a genetic modification of polynucleotides encoding components of the circadian clock, and environmental signal sensors, the programmable nucleic acid modification system specifically targets a nucleic acid sequence in a polynucleotide encoding the components of the circadian clock, environmental signal sensors, or any combination thereof. The programmable nucleic acid modification system can comprise an interfering nucleic acid molecule or a nucleic acid editing system.

### A. RNAi

[0142] In some aspects, the programmable expression modification system comprises an interfering nucleic acid (RNAi) molecule having a nucleotide sequence complementary to a target sequence within a gene encoding the polypeptide or polynucleotide used to inhibit expression of the polypeptide or polynucleotide. RNAi molecules generally act by forming a heteroduplex with a target RNA molecule, which is selectively degraded or “knocked down,” hence inactivating the target RNA. Under some conditions, an interfering RNA molecule can also inactivate a target transcript by repressing transcript translation and/or inhibiting transcription. An interfering RNA is more generally said to be “targeted against” a biologically relevant target, such as a protein, when it is targeted against the nucleic acid encoding the target. For example, an interfering RNA molecule has a nucleotide (nt) sequence which is complementary to an endogenous mRNA of a target gene sequence. Thus, given a target gene sequence, an interfering RNA molecule can be prepared which has a nucleotide sequence at least a portion of which is complementary to a target gene sequence. When introduced into cells, the interfering RNA binds to the target mRNA, thereby functionally inactivating the target mRNA and/or leading to degradation of the target mRNA.

[0143] Interfering RNA molecules include, inter alia, small interfering RNA (siRNA), microRNA (miRNA), piwi-interacting RNA (piRNA), long non-coding RNAs (long ncRNAs or lncRNAs), and small hairpin RNAs (shRNA). lncRNAs are widely expressed and have key roles in gene regulation. Depending on their localization and their specific interactions with DNA, RNA and proteins, lncRNAs can modulate chromatin function, regulate the assembly and function of membraneless nuclear bodies, alter the stability and translation of cytoplasmic mRNAs, and interfere with signaling pathways. Piwi-interacting RNA (piRNA) is the largest class of small non-coding RNA molecules expressed in animal cells. piRNAs regulate gene expression through interactions with piwi-subfamily Argonaute proteins. SiRNA are double-stranded RNA molecules, preferably about 19-25 nucleotides in length. When transfected into cells, siRNA inhibit the target mRNA transiently until they are also degraded within the cell. MiRNA and siRNA are biochemically and functionally indistinguishable. Both are about the same in nucleotide length with 5′-phosphate and 3′-hydroxyl ends, and assemble into an RNA-induced silencing complex (RISC) to silence specific gene expression. siRNA and miRNA are distinguished based on origin. siRNA is obtained from long double-stranded RNA (dsRNA), while miRNA is derived from the double-stranded region of a 60-70 nt RNA hairpin precursor. Small hairpin RNAs (shRNA) are sequences of RNA, typically about 50-80 base pairs, or about 50, 55, 60, 65, 70, 75, or about 80 base pairs in length, that include a region of internal hybridization forming a stem loop structure consisting of a base-pair region of about 19-29 base pairs of double-strand RNA (the stem) bridged by a region of single-strand RNA (the loop) and a short 3′ overhang. shRNA molecules are processed within the cell to form siRNA which in turn knock down target gene expression. shRNA can be incorporated into plasmid vectors and integrated into genomic DNA for longer-term or stable expression, and thus longer knockdown of the target mRNA.

[0144] Interfering nucleic acid molecules can contain RNA bases, non-RNA bases, or a mixture of RNA bases and non-RNA bases. For example, interfering nucleic acid molecules provided herein can be primarily composed of RNA bases but also contain DNA bases or non-naturally occurring nucleotides. The interfering nucleic acids can employ a variety of oligonucleotide chemistries. Examples of oligonucleotide chemistries include, without limitation, peptide nucleic acid (PNA), linked nucleic acid (LNA), phosphorothioate, 2′O-Me-modified oligonucleotides, and morpholino chemistries, including combinations of any of the foregoing. In general, PNA and LNA chemistries can utilize shorter targeting sequences because of their relatively high target binding strength relative to 2′O-Me oligonucleotides. Phosphorothioate and 2′O-Me-modified chemistries are often combined to generate 2′O-Me-modified oligonucleotides having a phosphorothioate backbone.

### B. Programmable Nucleic Acid Editing Systems

[0145] In some aspects, the programmable nucleic acid modification system is a programmable nucleic acid editing system. Editing systems generally comprise a programmable nucleic acid binding domain and a nuclease domain to generate a programmable nucleic acid nuclease system or a transcription factor domain to create a programmable transcription regulation system. A programmable nucleic acid binding domain of an editing system is capable of targeting a nucleic acid sequence in a polynucleotide, a nuclease is capable of facilitating modification of the nucleic acid sequence of the polynucleotide, and a transcription factor is capable of regulating transcription and thus expression of the polynucleotide.

[0146] Programmable nucleic acid binding domains rely for specificity on the delivery of exogenous protein(s), and/or a guide RNA (gRNA), deadRNA (dRNA), or single guide RNA (sgRNA) having a sequence which binds specifically to a gene sequence of interest. Non-limiting examples of programmable nucleic acid binding domains that can be used in a programmable nucleic acid editing system include, without limit, a programmable nucleic acid domain of RNA-guided clustered regularly interspersed short palindromic repeats (CRISPR)/CRISPR-associated (Cas) (CRISPR/Cas) nuclease systems, a CRISPR/Cpf1 nuclease system, a zinc finger nuclease (ZFN), a transcription activator-like effector (TALE), a meganuclease, and a ribozyme. Other suitable programmable nucleic acid binding domains will be recognized by individuals skilled in the art.

[0147] When the programmable nucleic acid modification system comprises more than one component, such as a binding protein, a nuclease, a transcription factor or a guide nucleic acid, the multi-component modification system can be modular, in that the different components can optionally be distributed among two or more nucleic acid constructs as described herein. The system components can be delivered by a plasmid or viral vector or as a synthetic oligonucleotide. More detailed descriptions of non-limiting examples of programmable nucleic acid editing systems can be as described further below. All the systems described herein below can be modified to comprise a transcription factor, a nuclease, or both.

i. CRISPR Nuclease Systems.

[0148] The programmable targeting nuclease can be an RNA-guided CRISPR endonuclease system. The CRISPR system comprises a guide RNA or sgRNA to a target sequence at which a protein of the system introduces a double-stranded break in a target nucleic acid sequence, and a CRISPR-associated endonuclease. The gRNA is a short synthetic RNA comprising a sequence necessary for endonuclease binding, and a preselected ˜20 nucleotide spacer sequence targeting the sequence of interest in a genomic target. Non-limiting examples of endonucleases include Cas1, Cas1 B, Cas2, Cas3, Cas4, Cas5, Cas6, Cas7, Cas8, Cas9 (also known as Csn1 and Csx12), Cas100, Csy1, Csy2, Csy3, Cse1, Cse2, Csc1, Csc2, Csa5, Csn2, Csm2, Csm3, Csm4, Csm5, Csm6, Cmr1, Cmr3, Cmr4, Cmr5, Cmr6, Csb1, Csb2, Csb3, Csx17, Csx14, Csx10, Csx16, CsaX, Csx3, Csx1, Csx15, Csf1, Csf2, Csf3, Csf4, or Cpf1 endonuclease, or a homolog thereof, a recombination of the naturally occurring molecule thereof, a codon-optimized version thereof, or a modified version thereof, or any combination thereof.

[0149] The CRISPR nuclease system can be derived from any type of CRISPR system, including a type I (i.e., IA, IB, IC, ID, IE, or IF), type II (i.e., IIA, IIB, or IIC), type III (i.e., IIIA or IIIB), or type V CRISPR system. The CRISPR/Cas system can be from Streptococcus sp. (e.g., Streptococcus pyogenes), Campylobacter sp. (e.g., Campylobacter jejuni), Francisella sp. (e.g., Francisella novicida), Acaryochloris sp., Acetohalobium sp., Acidaminococcus sp., Acidithiobacillus sp., Alicyclobacillus sp., Allochromatium sp., Ammonifex sp., Anabaena sp., Arthrospira sp., Bacillus sp., Burkholderiales sp., Caldicelulosiruptor sp., Candidatus sp., Clostridium sp., Crocosphaera sp., Cyanothece sp., Exiguobacterium sp., Finegoldia sp., Ktedonobacter sp., Lactobacillus sp., Lyngbya sp., Marinobacter sp., Methanohalobium sp., Microscilla sp., Microcoleus sp., Microcystis sp., Natranaerobius sp., Neisseria sp., Nitrosococcus sp., Nocardiopsis sp., Nodularia sp., Nostoc sp., Oscillatoria sp., Polaromonas sp., Pelotomaculum sp., Pseudoalteromonas sp., Petrotoga sp., Prevotella sp., Staphylococcus sp., Streptomyces sp., Streptosporangium sp., Synechococcus sp., or Thermosipho sp.

[0150] Non-limiting examples of suitable CRISPR systems include CRISPR/Cas systems, CRISPR/Cpf systems, CRISPR/Cmr systems, CRISPR/Csa systems, CRISPR/Csb systems, CRISPR/Csc systems, CRISPR/Cse systems, CRISPR/Csf systems, CRISPR/Csm systems, CRISPR/Csn systems, CRISPR/Csx systems, CRISPR/Csy systems, CRISPR/Csz systems, and derivatives or variants thereof. Preferably, the CRISPR system can be a type II Cas9 protein, a type V Cpf1 protein, or a derivative thereof. In some aspects, the CRISPRICas nuclease is Streptococcus pyogenes Cas9 (SpCas9), Streptococcus thermophilus Cas9 (StCas9), Campylobacter jejuni Cas9 (CjCas9), Francisella novicida Cas9 (FnCas9), or Francisella novicida Cpf1 (FnCpf1).

[0151] In general, a protein of the CRISPR system comprises an RNA recognition and/or RNA binding domain, which interacts with the guide RNA. A protein of the CRISPR system also comprises at least one nuclease domain having endonuclease activity. For example, a Cas9 protein can comprise a RuvC-like nuclease domain and an HNH-like nuclease domain, and a Cpf1 protein can comprise a RuvC-like domain. A protein of the CRISPR system can also comprise DNA binding domains, helicase domains, RNase domains, protein-protein interaction domains, dimerization domains, as well as other domains.

[0152] A protein of the CRISPR system can be associated with guide RNAs (gRNA). The guide RNA can be a single guide RNA (i.e., sgRNA), or can comprise two RNA molecules (i.e., crRNA and tracrRNA). The guide RNA interacts with a protein of the CRISPR system to guide it to a target site in the DNA. The target site has no sequence limitation except that the sequence is bordered by a protospacer adjacent motif (PAM). For example, PAM sequences for Cas9 include 3′-NGG, 3′-NGGNG, 3-NNAGAAW, and 3′-ACAY, and PAM sequences for Cpf1 include 5′-TTN (wherein N is defined as any nucleotide, W is defined as either A or T, and Y is defined as either C or T). Each gRNA comprises a sequence that is complementary to the target sequence (e.g., a Cas9 gRNA can comprise GN17-20GG). The gRNA can also comprise a scaffold sequence that forms a stem loop structure and a single-stranded region. The scaffold region can be the same in every gRNA. In some aspects, the gRNA can be a single molecule (i.e., sgRNA). In other aspects, the gRNA can be two separate molecules. Those skilled in the art are familiar with gRNA design and construction, e.g., gRNA design tools are available on the internet or from commercial sources.

[0153] A CRISPR system can comprise one or more nucleic acid binding domains associated with one or more, or two or more selected guide RNAs used to direct the CRISPR system to one or more, or two or more selected target nucleic acid loci. For instance, a nucleic acid binding domain can be associated with one or more, or two or more selected guide RNAs, each selected guide RNA, when complexed with a nucleic acid binding domain, causing the CRISPR system to localize to the target of the guide RNA.

[0154] The programmable targeting nuclease can also be a CRISPR nickase system. CRISPR nickase systems are similar to the CRISPR nuclease systems described above except that a CRISPR nuclease of the system is modified to cleave only one strand of a double-stranded nucleic acid sequence. Thus, a CRISPR nickase, in combination with a guide RNA of the system, can create a single-stranded break or nick in the target nucleic acid sequence. Alternatively, a CRISPR nickase in combination with a pair of offset gRNAs can create a double-stranded break in the nucleic acid sequence.

[0155] A CRISPR nuclease of the system can be converted to a nickase by one or more mutations and/or deletions. For example, a Cas9 nickase can comprise one or more mutations in one of the nuclease domains, wherein the one or more mutations can be D10A, E762A, and/or D986A in the RuvC-like domain, or the one or more mutations can be H840A (or H839A), N854A and/or N863A in the HNH-like domain.

[0156] A nuclease of a CRISPR nuclease system can be inactivated to obtain a programmable targeting protein that can be associated with a transcription factor capable of regulating expression of a polynucleotide. For instance, a CRISPR/Cas system can comprise a nuclease-deficient CAS9 protein (dCAS9) fused to a transcriptional activator and a guide RNA (gRNA).

ii. ssDNA-Guided Argonaute Systems.

[0157] Alternatively, the programmable targeting nuclease can comprise a single-stranded DNA-guided Argonaute (Ago) protein. Ago proteins are ubiquitously expressed and bind to siRNAs or miRNAs to guide post-transcriptional gene silencing either by destabilization of the mRNA or by translational repression.

[0158] Some prokaryotic Agos use single-stranded guide DNAs and create double-stranded breaks in nucleic acid sequences. The ssDNA-guided Ago endonuclease can be associated with a single-stranded guide DNA.

[0159] The Ago programmable protein can be derived from Alistipes sp., Aquifex sp., Archaeoglobus sp., Bacteroides sp., Bradyrhizobium sp., Burkholderia sp., Cellvibrio sp., Chlorobium sp., Geobacter sp., Mariprofundus sp., Natronobacterium sp., Parabacteriodes sp., Parvularcula sp., Planctomyces sp., Pseudomonas sp., Pyrococcus sp., Thermus sp., or Xanthomonas sp. For instance, the Ago protein can be Natronobacterium gregoryi Ago (NgAgo). Alternatively, the Ago protein can be Thermus thermophilus Ago (TtAgo). The Ago protein can also be Pyrococcus furiosus (PfAgo).

[0160] The single-stranded guide DNA (gDNA) of an ssDNA-guided Argonaute system is complementary to the target site in the nucleic acid sequence. The target site has no sequence limitations and does not require a PAM. The gDNA generally ranges in length from about 15-30 nucleotides. The gDNA can comprise a 5′ phosphate group. Those skilled in the art are familiar with ssDNA oligonucleotide design and construction.

iii. Zinc Finger Programmable Targeting Proteins.

[0161] A ZFN programmable nucleic acid binding protein comprises a DNA-binding zinc finger region that can comprise from about two to seven zinc fingers, for example, about four to six zinc fingers, wherein each zinc finger binds three nucleotides. The zinc finger region can be engineered to recognize and bind to any DNA sequence. Zinc finger design tools or algorithms are available on the internet or from commercial sources. The zinc fingers can be linked together using suitable linker sequences. ZFN programmable nucleic acid binding proteins can be linked to a nuclease or a transcription factor to generate a programmable nucleic acid modification system comprising targeting a specific nucleic acid sequence.

iv. Transcription Activator-Like Effector Nuclease Systems.

[0162] The programmable targeting protein can also be a transcription activator-like effector (TALE) or the like. TALENs comprise a DNA-binding domain composed of highly conserved repeats derived from transcription activator-like effectors (TALEs) that are linked to a nuclease domain. TALEs are proteins secreted by plant pathogen Xanthomonas to alter transcription of genes in host plant cells. TALE repeat arrays can be engineered via modular protein design to target any DNA sequence of interest. Other transcription activator-like effector nuclease systems can comprise, but are not limited to, the repetitive sequence, transcription activator like effector (RipTAL) system from the bacterial plant pathogenic Ralstonia solanacearum species complex (Rssc). The nuclease domain of TALEs can be any nuclease domain as described above in Section IV(a)(i).

v. Meganucleases or Rare-Cutting Endonuclease Systems.

[0163] The programmable targeting nuclease can also be a meganuclease or derivative thereof. Meganucleases are endodeoxyribonucleases characterized by long recognition sequences, i.e., the recognition sequence generally ranges from about 12 base pairs to about 45 base pairs. As a consequence of this requirement, the recognition sequence generally occurs only once in any given genome. Among meganucleases, the family of homing endonucleases named LAGLIDADG has become a valuable tool for the study of genomes and genome engineering. Non-limiting examples of meganucleases that can be suitable for the instant disclosure include I-SceI, I-CreI, I-DmoI, or variants and combinations thereof. A meganuclease can be targeted to a specific nucleic acid sequence by modifying its recognition sequence using techniques well known to those skilled in the art.

[0164] The programmable targeting nuclease can be a rare-cutting endonuclease or derivative thereof. Rare-cutting endonucleases are site-specific endonucleases whose recognition sequence occurs rarely in a genome, such as only once in a genome. The rare-cutting endonuclease can recognize a 7-nucleotide sequence, an 8-nucleotide sequence, or longer recognition sequence. Non-limiting examples of rare-cutting endonucleases include NotI, AscI, PacI, AsiSI, SbfI, and FseI.

vi. Endonuclease Domains

[0165] Non-limiting examples of endonucleases include Cas1, Cas1 B, Cas2, Cas3, Cas4, Cas5, Cas6, Cas7, Cas8, Cas9 (also known as Csn1 and Csx12), Cas100, Csy1, Csy2, Csy3, Cse1, Cse2, Csc1, Csc2, Csa5, Csn2, Csm2, Csm3, Csm4, Csm5, Csm6, Cmr1, Cmr3, Cmr4, Cmr5, Cmr6, Csb1, Csb2, Csb3, Csx17, Csx14, Csx10, Csx16, CsaX, Csx3, Csx1, Csx15, Csf1, Csf2, Csf3, Csf4, or Cpf1 endonuclease, or a homolog thereof, a recombination of the naturally occurring molecule thereof, a codon-optimized version thereof, or a modified version thereof, or any combination thereof.

vii. Transcription Factor Domains

[0166] Non-limiting examples of suitable transcription transcriptional activation domains include, without limit, herpes simplex virus VP16 domain, VP64 (which is a tetrameric derivative of VP16), VP160 (i.e., 10×VP16), VP128, p65 activation domain from NFKB, p53 activation domains 1 and 2, heat-shock factor 1 (HSF1) activation domain, MyoD1 activation domain, GCN4 peptide, 10×GCN4, viral R transactivator (Rta), VPR (a fusion of VP64-p65-Rta), p53 activation domains 1 and 2, CREB (cAMP response element binding protein) activation domains, E2A activation domains, activation domains from human heat-shock factor 1 (HSF1), NFAT (nuclear factor of activated T-cells) activation domains, a histone acetyltransferase, activation domains from the Arabidopsis thaliana MYB46, HAM1, HAM2, MYB112, WRKY11, ERF6, or a combination thereof. Engineered transcription activation systems may comprise one transcription activation domain, two transcription activation domains, three transcription activation domains, or more than three transcription activation domains.

[0167] Non-limiting examples of transcription repressor domains include Kruppel-associated Box (KRAB), EAR-repression domain (SRDX), and BRD.

viii. Optional Additional Domains.

[0168] The programmable targeting nuclease can further comprise at least one nuclear localization signal (NLS), at least one cell-penetrating domain, at least one reporter domain, and/or at least one linker.

[0169] In general, an NLS comprises a stretch of basic amino acids. Nuclear localization signals are known in the art (see, e.g., Lange et al., J. Biol. Chem., 2007, 282:5101-5105). The NLS can be located at the N-terminus, the C-terminal, or in an internal location of the fusion protein.

[0170] A cell-penetrating domain can be a cell-penetrating peptide sequence derived from the HIV-1 TAT protein. The cell-penetrating domain can be located at the N-terminus, the C-terminal, or in an internal location of the fusion protein.

[0171] A programmable targeting nuclease can further comprise at least one linker. For example, the programmable targeting nuclease, the nuclease domain of the targeting nuclease, and other optional domains can be linked via one or more linkers. The linker can be flexible (e.g., comprising small, non-polar (e.g., Gly) or polar (e.g., Ser, Thr) amino acids). Examples of suitable linkers are well known in the art, and programs to design linkers are readily available (Crasto et al., Protein Eng., 2000, 13(5):3096-312). In alternate aspects, the programmable targeting nuclease, the cell cycle regulated protein, and other optional domains can be linked directly.

[0172] A programmable targeting nuclease can further comprise an organelle localization or targeting signal that directs a molecule to a specific organelle. A signal can be a polynucleotide or polypeptide signal, or can be an organic or inorganic compound sufficient to direct an attached molecule to a desired organelle. Organelle localization signals can be as described in U.S. Patent Publication No. 20070196334, the disclosure of which is incorporated herein in its entirety.

### (b) Aspects of Engineered Nucleic Acid Modification Systems

[0173] In some aspects, the engineered nucleic acid modification system is a programmable nucleic acid editing system. Programmable nucleic acid editing systems can be as described in Section II(a) herein above. In some aspects, the programmable nucleic acid modification system comprises a CRISPR/Cas nuclease system comprising a CAS9 protein (dCAS9) and a guide RNA (gRNA). In some aspects, an expression construct expressing the Cas9 protein comprises a nucleic acid sequence comprising at least about 75%, 76%, 77%, 78%, 79%, 80%, 81%, 82%, 83%, 84%, 85%, 86%, 87%, 88%, 89%, 90%, 91%, 92%, 93%, 94%, 95%, 96%, 97%, 98%, 99%, or 100% sequence identity with a nucleic acid sequence starting at base number 1552 to base number 7881 of SEQ ID NO: 32. In some aspects, an expression construct expressing the Cas9 protein comprises a nucleic acid sequence comprising at least about 75% or more, at least about 85% or more, at least about 95% or more, or 100% sequence identity with a nucleic acid sequence starting at base number 1552 to base number 7881 of SEQ ID NO: 32.

[0174] In some aspects, the programmable nucleic acid editing system is targeted to a nucleic acid sequence in a polynucleotide encoding a component of the circadian clock. In some aspects, the programmable nucleic acid modification system introduces a loss of function mutation into a polynucleotide encoding a component of the circadian clock. In some aspects, the component of the circadian clock is an ELF3 protein and the programmable nucleic acid editing system is targeted to a nucleic acid sequence in a polynucleotide encoding the ELF3 protein. In some aspects, the programmable nucleic acid editing system introduces a loss of function mutation into a polynucleotide encoding an ELF3 protein. In some aspects, the programmable nucleic acid modification system is a CRISPR/Cas system comprising a Cas9 nuclease and a guide RNA (gRNA) comprising a sequence complementary to a target sequence within a nucleic acid sequence in a polynucleotide encoding an ELF3 protein.

[0175] In some aspects, the modified plant is T. arvense. When the modified plant is T. arvense, the programmable nucleic acid modification system can comprise a Cas9 protein encoded by a nucleic acid sequence comprising at least about 75%, 76%, 77%, 78%, 79%, 80%, 81%, 82%, 83%, 84%, 85%, 86%, 87%, 88%, 89%, 90%, 91%, 92%, 93%, 94%, 95%, 96%, 97%, 98%, 99%, or 100% sequence identity with a nucleic acid sequence of SEQ ID NO: 29 and one or more gRNAs comprising a nucleic acid sequence of SEQ ID NO: 30, SEQ ID NO: 31, or a combination thereof. In some aspects, when the modified plant is T. arvense, the programmable nucleic acid modification system comprises a Cas9 protein encoded by a nucleic acid sequence comprising at least about 75% or more, at least about 85% or more, at least about 95% or more, or 100% sequence identity with a nucleic acid sequence of SEQ ID NO: 29 and one or more gRNAs comprising a nucleic acid sequence of SEQ ID NO: 30, SEQ ID NO: 31, or a combination thereof.

[0176] In some aspects, the modified plant is basil. When the modified plant is basil, the programmable nucleic acid modification system can comprise a Cas9 protein encoded by a nucleic acid sequence comprising at least about 75%, 76%, 77%, 78%, 79%, 80%, 81%, 82%, 83%, 84%, 85%, 86%, 87%, 88%, 89%, 90%, 91%, 92%, 93%, 94%, 95%, 96%, 97%, 98%, 99%, or 100% sequence identity with a nucleic acid sequence of SEQ ID NO: 29 and one or more gRNAs comprising a nucleic acid sequence of SEQ ID NOs: 33-36, or any combination thereof. In some aspects, when the modified plant is basil, the programmable nucleic acid modification system comprises a Cas9 protein encoded by a nucleic acid sequence comprising at least about 75% or more, at least about 85% or more, at least about 95% or more, or 100% sequence identity with a nucleic acid sequence of SEQ ID NO: 29 and one or more gRNAs comprising a nucleic acid sequence of SEQ ID NOs: 33-36, or any combination thereof.

### III. Nucleic Acid Constructs

[0177] Another aspect of the present disclosure encompasses one or more nucleic acid constructs for genetically modifying a plant. In some aspects, the one or more constructs can modify a component of the circadian clock, modify an environmental signal sensor, or both in a plant.

[0178] Any of the multi-component systems described herein are to be considered modular, in that the different components can optionally be distributed among two or more nucleic acid constructs as described herein. The nucleic acid constructs can be DNA or RNA, linear or circular, single-stranded or double-stranded, or any combination thereof. The nucleic acid constructs can be codon-optimized for efficient translation into protein, and possibly for transcription into an RNA donor polynucleotide transcript in the cell of interest. Codon optimization programs are available as freeware or from commercial sources.

[0179] The nucleic acid constructs can be used to express one or more components of the system for later introduction into a cell to be modified. Alternatively, the nucleic acid constructs can be introduced into the cell to be modified for expression of the components of the system in the cell. In some aspects, the nucleic acid constructs transiently express the various components of the system. Transiently expressing the system in a plant overcomes the cumbersome regulatory hurdles required for traditionally modified crops. In some aspects, the engineered nucleic acid modification system is expressed in male reproductive tissues, modifies expression of various factors described herein above in male reproductive tissues, or both.

[0180] Expression constructs generally comprise DNA coding sequences operably linked to at least one promoter control sequence for expression in a cell of interest. Promoter control sequences can control expression of a system for modifying a component of the circadian clock, a system for modifying an environmental signal sensor, or both in in bacterial (e.g., E. coli) cells or eukaryotic (e.g., yeast, insect, mammalian, or plant) cells. Suitable bacterial promoters include, without limit, T7 promoters, lac operon promoters, trp promoters, tac promoters (which are hybrids of trp and lac promoters), variations of any of the foregoing, and combinations of any of the foregoing. Non-limiting examples of suitable eukaryotic promoters include constitutive, regulated, or cell- or tissue-specific promoters.

[0181] Suitable eukaryotic constitutive promoter control sequences include, but are not limited to, pU10, cytomegalovirus immediate early promoter (CMV), simian virus (SV40) promoter, adenovirus major late promoter, Rous sarcoma virus (RSV) promoter, mouse mammary tumor virus (MMTV) promoter, phosphoglycerate kinase (PGK) promoter, elongation factor (ED1)-alpha promoter, ubiquitin promoters, actin promoters, tubulin promoters, immunoglobulin promoters, fragments thereof, or combinations of any of the foregoing. Examples of suitable eukaryotic regulated promoter control sequences include, without limit, those regulated by heat shock, metals, steroids, antibiotics, or alcohol. Non-limiting examples of tissue-specific promoters include B29 promoter, CD14 promoter, CD43 promoter, CD45 promoter, CD68 promoter, desmin promoter, elastase-1 promoter, endoglin promoter, fibronectin promoter, Flt-1 promoter, GFAP promoter, GPIIb promoter, ICAM-2 promoter, INF-β promoter, Mb promoter, NphsI promoter, OG-2 promoter, SP-B promoter, SYN1 promoter, and WASP promoter.

[0182] Promoters can also be plant-specific promoters, or promoters that can be used in plants. A wide variety of plant promoters are known to those of ordinary skill in the art, as are other regulatory elements that can be used alone or in combination with promoters.

[0183] Promoters can be divided into two types, namely, constitutive promoters and non-constitutive promoters. Constitutive promoters are classified as providing for a range of constitutive expression. Thus, some are weak constitutive promoters, and others are strong constitutive promoters. Non-constitutive promoters include tissue-preferred promoters, tissue-specific promoters, cell-type specific promoters, and inducible promoters. Suitable plant-specific constitutive promoter control sequences include, but are not limited to, a CaMV35S promoter, CaMV 19S, GOS2, Arabidopsis At6669 promoter, Rice cyclophilin, Maize H3 histone, Synthetic Super MAS, an opine promoter, a plant ubiquitin (Ubi) promoter, an actin 1 (Act-1) promoter, pEMU, Cestrum yellow leaf curling virus promoter (CYMLV promoter), and an alcohol dehydrogenase 1 (Adh-1) promoter. Other constitutive promoters include those in U.S. Pat. Nos. 5,659,026; 5,608,149; 5,608,144; 5,604,121; 5,569,597; 5,466,785; 5,399,680; 5,268,463; and 5,608,142.

[0184] Regulated plant promoters respond to various forms of environmental stresses, or other stimuli, including, for example, mechanical shock, heat, cold, flooding, drought, salt, anoxia, pathogens such as bacteria, fungi, and viruses, and nutritional deprivation, including deprivation during times of flowering and/or fruiting, and other forms of plant stress. For example, the promoter can be a promoter which is induced by one or more, but not limited to one of the following: abiotic stresses such as wounding, cold, desiccation, ultraviolet-B, heat shock or other heat stress, drought stress or water stress. The promoter can further be one induced by biotic stresses including pathogen stress, such as stress induced by a virus or fungi, stresses induced as part of the plant defense pathway or by other environmental signals, such as light, carbon dioxide, hormones or other signaling molecules such as auxin, hydrogen peroxide and salicylic acid, sugars and gibberellin or abscisic acid and ethylene. Suitable regulated plant promoter control sequences include, but are not limited to, salt-inducible promoters such as RD29A; drought-inducible promoters such as maize rab17 gene promoter, maize rab28 gene promoter, and maize Ivr2 gene promoter; heat-inducible promoters such as heat tomato hsp80-promoter from tomato.

[0185] Tissue-specific promoters can include, but are not limited to, fiber-specific, green tissue-specific, root-specific, stem-specific, flower-specific, callus-specific, pollen-specific, egg-specific, promoters specific to male or female reproductive tissues, and seed coat-specific. Suitable tissue-specific plant promoter control sequences include, but are not limited to, leaf-specific promoters [such as described, for example, by Yamamoto et al., Plant J. 12:255-265, 1997; Kwon et al., Plant Physiol. 105:357-67, 1994; Yamamoto et al., Plant Cell Physiol. 35:773-778, 1994; Gotor et al., Plant J. 3:509-18, 1993; Orozco et al., Plant Mol. Biol. 23:1129-1138, 1993; and Matsuoka et al., Proc. Natl. Acad. Sci. USA 90:9586-9590, 1993], seed-preferred promoters [e.g., from seed-specific genes (Simon et al., Plant Mol. Biol. 5. 191, 1985; Scofield et al., J. Biol. Chem. 262: 12202, 1987; Baszczynski et al., Plant Mol. Biol. 14: 633, 1990), Brazil Nut albumin (Pearson et al., Plant Mol. Biol. 18: 235-245, 1992), legumin (Ellis et al., Plant Mol. Biol. 10: 203-214, 1988), Glutelin (rice) (Takaiwa et al., Mol. Gen. Genet. 208: 15-22, 1986; Takaiwa et al., FEBS Letts. 221: 43-47, 1987), Zein (Matzke et al., Plant Mol Biol, 143: 323-32, 1990), napA (Stalberg et al., Planta 199: 515-519, 1996), Wheat SPA (Albanietal, Plant Cell, 9: 171-184, 1997), sunflower oleosin (Cummins et al., Plant Mol. Biol. 19: 873-876, 1992)], endosperm specific promoters [e.g., wheat LMW and HMW, glutenin-1 (Mol Gen Genet 216:81-90, 1989; NAR 17:461-2), wheat a, b, and g gliadins (EMBO3:1409-15, 1984), Barley Itrl promoter, barley B1, C, D hordein (Theor Appl Gen 98:1253-62, 1999; Plant J 4:343-55, 1993; Mol Gen Genet 250:750-60, 1996), Barley DOF (Mena et al., The Plant Journal, 116(1): 53-62, 1998), Biz2 (EP99106056.7), Synthetic promoter (Vicente-Carbajosa et al., Plant J. 13: 629-640, 1998), rice prolamin NRP33, rice-globulin Glb-1 (Wu et al., Plant Cell Physiology 39(8) 885-889, 1998), rice alpha-globulin REB/OHP-1 (Nakase et al., Plant Mol. Biol. 33: 513-S22, 1997), rice ADP-glucose PP (Trans Res 6:157-68, 1997), maize ESR gene family (Plant J 12:235-46, 1997), sorgum gamma-kafirin (PMB 32:1029-35, 1996)], embryo-specific promoters [e.g., rice OSH1 (Sato et al., Proc. Natl. Acad. Sci. USA, 93: 8117-8122), KNOX (Postma-Haarsma et al., Plant Mol. Biol. 39:257-71, 1999), rice oleosin (Wu et al., J. Biochem., 123:386, 1998)], and flower-specific promoters [e.g., AtPRP4, chalene synthase (chsA) (Van der Meer et al., Plant Mol. Biol. 15, 95-109, 1990), LAT52 (Twell et al., Mol. Gen Genet. 217:240-245; 1989), apetala-3].

[0186] Any of the promoter sequences can be wild type or can be modified for more efficient or efficacious expression. The DNA coding sequence also can be linked to a polyadenylation signal (e.g., SV40 polyA signal, bovine growth hormone (BGH) polyA signal, etc.) and/or at least one transcriptional termination sequence. In some situations, the complex or fusion protein can be purified from the bacterial or eukaryotic cells.

[0187] Nucleic acids encoding one or more components of an engineered DNA methylation system and/or transcription activation system can be present in a construct. Suitable constructs include plasmid constructs, viral constructs, and self-replicating RNA (Yoshioka et al., Cell Stem Cell, 2013, 13:246-254). For instance, the nucleic acid encoding one or more components of an engineered DNA methylation system and/or transcription activation system can be present in a plasmid construct.

[0188] Non-limiting examples of suitable plasmid constructs include pUC, pBR322, pET, pBluescript, and variants thereof. Alternatively, the nucleic acid encoding one or more components of an engineered DNA methylation system and/or transcription activation system can be part of a viral vector (e.g., lentiviral vectors, adeno-associated viral vectors, adenoviral vectors, and so forth).

[0189] The plasmid or viral vector can comprise additional expression control sequences (e.g., enhancer sequences, Kozak sequences, polyadenylation sequences, transcriptional termination sequences, etc.), selectable reporter sequences (e.g., antibiotic resistance genes), origins of replication, T-DNA border sequences, and the like. The plasmid or viral vector can further comprise RNA processing elements such as glycine tRNAs, or Csy4 recognition sites. Such RNA processing elements can, for instance, intersperse polynucleotide sequences encoding multiple gRNAs under the control of a single promoter to produce the multiple gRNAs from a transcript encoding the multiple gRNAs. When a cys4 recognition cite is used, a vector can further comprise sequences for expression of Csy4 RNAse to process the gRNA transcript. Additional information about vectors and use thereof can be found in “Current Protocols in Molecular Biology”, Ausubel et al., John Wiley & Sons, New York, 2003, or “Molecular Cloning: A Laboratory Manual”, Sambrook & Russell, Cold Spring Harbor Press, Cold Spring Harbor, NY, 3rd edition, 2001.

[0190] The plasmid or viral vector can also comprise a transit peptide for targeting of a protein product, particularly to a chloroplast, leucoplast or other plastid organelle or vacuole or an extracellular location. For descriptions of the use of chloroplast transit peptides, see U.S. Pat. Nos. 5,188,642 and 5,728,925, herein incorporated by reference in their entirety. Many chloroplast-localized proteins are expressed from nuclear genes as precursors and are targeted to the chloroplast by a chloroplast transit peptide (CTP). Examples of other such isolated chloroplast proteins include, but are not limited to those associated with the small subunit (SSU) of ribulose-1,5-bisphosphate carboxylase, ferredoxin, ferredoxin oxidoreductase, the light-harvesting complex protein I and protein II, thioredoxin F, enolpyruvyl shikimate phosphate synthase (EPSPS) and transit peptides described in U.S. Pat. No. 7,193,133, herein incorporated by reference. It has been demonstrated in vivo and in vitro that non-chloroplast proteins can be targeted to the chloroplast by use of protein fusions with a heterologous CTP and that the CTP is sufficient to target a protein to the chloroplast. Incorporation of a suitable chloroplast transit peptide, such as, the Arabidopsis thaliana EPSPS CTP (CTP2, Klee et al., Mol. Gen. Genet. 210:437-442), and the Petunia hybrida EPSPS CTP (CTP4, della-Cioppa et al., Proc. Natl. Acad. Sci. USA 83:6873-6877) has been show to target heterologous EPSPS protein sequences to chloroplasts in transgenic plants. The production of glyphosate tolerant plants by expression of a fusion protein comprising an amino-terminal CTP with a glyphosate resistant EPSPS enzyme is well known by those skilled in the art, (U.S. Pat. Nos. 5,627,061, 5,633,435, 5,312,910, EP 0218571, EP 189707, EP 508909, and EP 924299).

[0191] In some aspects, the one or more constructs comprise one or more expression constructs encoding a system for modifying a component of the circadian clock, a system for modifying an environmental signal sensor, or both in a plant. The constructs can comprise a construct comprising an expression construct for modifying the expression of a component of the circadian clock; a construct comprising an expression construct for modifying the expression of an environmental signal sensor; or a construct comprising an expression construct for modifying the expression of a component of the circadian clock and an expression construct for modifying the expression of an environmental signal sensor.

[0192] In some aspects, an expression construct comprises a promoter operably linked to a polynucleotide encoding a component of the circadian clock, an environmental signal sensor, or both. In some aspects, the expression construct comprises a promoter operably linked to a polynucleotide encoding an environmental signal sensor. In some aspects, the environmental sensor is phyB. In one aspect, the phyB photoreceptor is a constitutively expressed phytochrome B photoreceptor. In some aspects, the expression construct comprises a nucleic acid sequence comprising about 75%, 76%, 77%, 78%, 79%, 80%, 81%, 82%, 83%, 84%, 85%, 86%, 87%, 88%, 89%, 90%, 91%, 92%, 93%, 94%, 95%, 96%, 97%, 98%, 99%, or 100% sequence identity with SEQ ID NO: 24 or a nucleic acid sequence comprising a nucleic acid sequence comprising about 75%, 76%, 77%, 78%, 79%, 80%, 81%, 82%, 83%, 84%, 85%, 86%, 87%, 88%, 89%, 90%, 91%, 92%, 93%, 94%, 95%, 96%, 97%, 98%, 99%, or 100% of a nucleic acid sequence starting at base 8148 to base 12020 of SEQ ID NO: 19. In some aspects, the expression construct comprises a nucleic acid sequence comprising about 75% or more, at least about 85% or more, at least about 95% or more, or 100% sequence identity with SEQ ID NO: 24 or a nucleic acid sequence comprising a nucleic acid sequence comprising about 75% or more, at least about 85% or more, at least about 95% or more, or 100% of a nucleic acid sequence starting at base 8148 to base 12020 of SEQ ID NO: 19.

[0193] In other aspects, an expression construct comprises a promoter operably linked to a nucleic acid sequence encoding a programmable nucleic acid modification system targeted to a nucleic acid sequence in a polynucleotide encoding a component of the circadian clock, an environmental signal sensor, or both. As used herein, a “programmable nucleic acid modification system” is a system capable of targeting and modifying the nucleic acid or modifying the expression or stability of a nucleic acid to alter a polynucleotide sequence or a protein or the expression of a polynucleotide sequence or protein encoded by the nucleic acid. Programmable nucleic acid modification systems can be as described in Section II herein above.

[0194] In some aspects, the programmable nucleic acid modification system is CRISPR/Cas system comprising a Cas9 nuclease and a guide RNA (gRNA) comprising a sequence complementary to a target sequence within the polynucleotide encoding a component of the circadian clock; a gRNA comprising a sequence complementary to a target sequence within the polynucleotide encoding a component of the circadian clock; or a gRNA comprising a sequence complementary to a target sequence within the polynucleotide encoding a component of the circadian clock and a gRNA comprising a sequence complementary to a target sequence within the polynucleotide encoding a component of the circadian clock. In some aspects, the Cas9 nuclease comprises a Cas9 nuclease comprising a nucleic acid sequence comprising at least about 75%, 76%, 77%, 78%, 79%, 80%, 81%, 82%, 83%, 84%, 85%, 86%, 87%, 88%, 89%, 90%, 91%, 92%, 93%, 94%, 95%, 96%, 97%, 98%, 99%, or 100% sequence identity with a nucleic acid sequence of SEQ ID NO: 29. In some aspects, the Cas9 nuclease comprises a Cas9 nuclease comprising a nucleic acid sequence comprising at least about 75% or more, at least about 85% or more, at least about 95% or more, or 100% sequence identity with a nucleic acid sequence of SEQ ID NO: 29.

[0195] In some aspects, the plant is Thlaspi arvense. When the plant is Thlaspi arvense, the programmable nucleic acid modification system can be a CRISPR/Cas system comprising a Cas9 nuclease and a gRNA comprising a sequence complementary to a target sequence within a polynucleotide encoding ELF3, and the polynucleotide encoding ELF3 comprises a nucleic acid sequence comprising at least about 75%, 76%, 77%, 78%, 79%, 80%, 81%, 82%, 83%, 84%, 85%, 86%, 87%, 88%, 89%, 90%, 91%, 92%, 93%, 94%, 95%, 96%, 97%, 98%, 99%, or 100% sequence identity with a nucleic acid sequence of SEQ ID NO: 20. In some aspects, the polynucleotide encoding ELF3 comprises a nucleic acid sequence comprising at least about 75% or more, at least about 85% or more, at least about 95% or more, or 100% sequence identity with a nucleic acid sequence of SEQ ID NO: 20. In some aspects, the gRNA comprises a nucleic acid sequence of SEQ ID NO: 30 (gRNA1), SEQ ID NO: 31 (gRNA2), or a combination thereof.

[0196] When the plant is Thlaspi arvense, the programmable nucleic acid modification system can be a CRISPR/Cas system comprising a Cas9 nuclease and a gRNA comprising a sequence complementary to a target sequence within a polynucleotide encoding ELF3, and an expression construct encoding SEQ ID NO: 30 (gRNA1) and SEQ ID NO: 31 (gRNA2) comprises at least about 75%, 76%, 77%, 78%, 79%, 80%, 81%, 82%, 83%, 84%, 85%, 86%, 87%, 88%, 89%, 90%, 91%, 92%, 93%, 94%, 95%, 96%, 97%, 98%, 99%, or 100% sequence identity with a nucleic acid sequence starting at base 254 to base 1287 of SEQ ID NO: 32. In some aspects, the expression construct encoding SEQ ID NO: 30 (gRNA1) and SEQ ID NO: 31 (gRNA2) comprises at least about 75%, 76%, 77%, 78%, 79%, 80%, 81%, 82%, 83%, 84%, 85%, 86%, 87%, 88%, 89%, 90%, 91%, 92%, 93%, 94%, 95%, 96%, 97%, 98%, 99%, or 100% sequence identity with a nucleic acid sequence starting at base 254 to base 1287 of SEQ ID NO: 32.

[0197] In some aspects, the polynucleotide encoding ELF3 comprises a nucleic acid sequence comprising at least about 75% or more, at least about 85% or more, at least about 95% or more, or 100% sequence identity with a nucleic acid sequence of SEQ ID NO: 20. In some aspects, the gRNA comprises a nucleic acid sequence of SEQ ID NO: 30 (gRNA1), SEQ ID NO: 31 (gRNA2), or a combination thereof.

[0198] In some aspects, the plant is Basil. When the plant is Basil, the programmable nucleic acid modification system can be a CRISPR/Cas system comprising a Cas9 nuclease and a gRNA comprising a sequence complementary to a target sequence within a polynucleotide encoding ELF3, and the polynucleotide encoding ELF3 comprises a nucleic acid sequence comprising at least about 75% or more, at least about 85% or more, at least about 95% or more, or 100% sequence identity with a nucleic acid sequence of SEQ ID NO: SEQ ID NO: 13. In some aspects, the gRNA comprises a nucleic acid sequence of SEQ ID NO: 33 to SEQ ID NO: 36, or a combination thereof.

[0199] In some aspects, an expression construct expressing the gRNAs of SEQ ID NOs: 33-36 comprises about 75%, 76%, 77%, 78%, 79%, 80%, 81%, 82%, 83%, 84%, 85%, 86%, 87%, 88%, 89%, 90%, 91%, 92%, 93%, 94%, 95%, 96%, 97%, 98%, 99%, or 100% sequence identity with SEQ ID NO: 23 or a nucleic acid sequence comprising a nucleic acid sequence comprising about 75%, 76%, 77%, 78%, 79%, 80%, 81%, 82%, 83%, 84%, 85%, 86%, 87%, 88%, 89%, 90%, 91%, 92%, 93%, 94%, 95%, 96%, 97%, 98%, 99%, or 100% of a nucleic acid sequence starting at base 695 to base 2799 of SEQ ID NO: 37. In some aspects, an expression construct expressing the gRNAs of SEQ ID NOs: 33-36 comprises about 75% or more, at least about 85% or more, at least about 95% or more, or 100% sequence identity with SEQ ID NO: 23 or a nucleic acid sequence comprising a nucleic acid sequence comprising about 75% or more, at least about 85% or more, at least about 95% or more, or 100% of a nucleic acid sequence starting at base 695 to base 2799 of SEQ ID NO: 37.

### IV. Methods

[0200] A further aspect of the present disclosure encompasses a method of improving performance of a plant grown under intensive, precision outdoor farming conditions and Total Controlled Environment Agriculture (TCEA), or vertical farming. The method comprises obtaining or having obtained a modified (modified plant) plant having reduced developmental plasticity; and cultivating the plant under intensive, precision outdoor farming conditions, TCEA, or vertical farming. Modified plants can be as described in Section I herein above.

[0201] As explained above, the inventors surprisingly discovered that ability of the plant to sense and respond to environmental cues, when combined with a modification of a circadian function of the plant, can reduce the plasticity of the plant in response to changes in environmental conditions during growth all while exhibiting improved agronomic traits regardless of changing environmental conditions. As the pathways and components of pathways for sensing and responding to environmental cues, and circadian functions can be conserved in plants, any plant can be modified using methods of the instant disclosure to generate comprising a modified ability to sense and respond to environmental cues, a modification of a circadian function of the plant. In some aspects, plants of the instant disclosure are A. thaliana. In some aspects, plants of the instant disclosure are T. arvense. In some aspects, plants of the instant disclosure are basil.

[0202] In some aspects, methods of the instant disclosure comprise introducing one or more expression constructs for modifying a plant exhibiting reduced developmental plasticity. The one or more expression constructs can comprise at least one or both of an expression construct for expressing a programmable nucleic acid modification system comprising a targeting nucleic acid sequence targeting a nucleic acid sequence in a polynucleotide sequence encoding a component of the circadian clock; and an expression construct for expressing an environmental signal sensor. The plant or plant cell is then grown under conditions whereby the one or more nucleic acid expression constructs express at least one or both of the programmable nucleic acid modification system; and the environmental signal sensor. In some aspects, the method can further comprise introducing the expression constructs. Nucleic acid constructs can be as described in Section III. Programmable nucleic acid modification systems can be as described in Section II herein above.

[0203] The expression constructs can comprise an exogenous nucleic acid molecule such as a chimeric nucleic acid of the disclosure. The term “exogenous” as used herein refers to a nucleic acid molecule originating from outside the plant cell. An exogenous nucleic acid molecule can be, for example, the coding sequence of a sterility factor or a fertility restorer. An exogenous nucleic acid molecule can have a naturally occurring or non-naturally occurring nucleotide sequence and can be a heterologous nucleic acid molecule derived from a different organism or a different plant species than the plant cell into which the nucleic acid molecule is introduced or can be a nucleic acid molecule derived from the same plant species as the plant cell into which it is introduced. The exogenous nucleic acid can or cannot be integrated in the plant cell's genome. When said exogenous nucleic acid/gene is not integrated, transient expression of the nucleic acid/gene occurs in the plant cell.

[0204] The one or more nucleic acid constructs can be introduced into the cell by a variety of means. Suitable delivery means include microinjection, electroporation, sonoporation, biolistics, calcium phosphate-mediated transfection, cationic transfection, liposomes and other lipids, dendrimer transfection, heat shock transfection, nucleofection transfection, gene gun delivery, dip transformation, supercharged proteins, cell-penetrating peptides, viral vectors, magnetofection, lipofection, impalefection, optical transfection, Agrobacterium tumefaciens mediated foreign gene transformation, proprietary agent-enhanced uptake of nucleic acids, and delivery via liposomes, immunoliposomes, virosomes, or artificial virions. The choice of means of introducing the system into a cell can and will vary depending on the cell, or the system or nucleic acid nucleic acid constructs encoding the system, among other variables.

[0205] The method can further comprise culturing a cell under conditions suitable for expressing the components of the systems and nucleic acid constructs of the instant disclosure. Methods of culturing cells are known in the art. In some aspects, the cell is from an animal, fungi, oomycete or prokaryote. In some aspects, the cell is a plant cell, plant, or plant part. When the cell is in tissue ex vivo, or in vivo within a plant or within a plant part, the plant part and/or plant can also be maintained under appropriate conditions for insertion of the donor polynucleotide. In general, the plant, plant part, or plant cell is maintained under conditions appropriate for cell growth and/or maintenance. Those of skill in the art appreciate that methods for culturing plant cells are known in the art and can and will vary depending on the cell type. Routine optimization can be used, in all cases, to determine the best techniques for a particular cell type. See for example, in Santiago et al. (2008) PNAS 105:5809-5814; Moehle et al. (2007) PNAS 104:3055-3060; Urnov et al. (2005) Nature 435:646-651; Lombardo et al. (2007) Nat. Biotechnology 25:1298-1306; and Taylor et al. (2012) Tropical Plant Biology 5:127-139.

[0206] Another aspect of the instant disclosure encompasses a method of reducing developmental plasticity of a plant. The method comprises generating a modified plant having reduced developmental plasticity. In some aspects, the plant is resistant to changes in growth conditions, which comprises daylength and temperature. Modified plants can be as described in Section I herein above. In some aspects, the plant is resistant to changes in growth conditions of the plant. In other aspects, the growth conditions comprise daylength and temperature.

[0207] Yet another aspect of the instant disclosure encompasses a method of reducing a plastic response to competition among a co-cultivated group of plants. The method comprising, co-cultivating a group of plants having reduced developmental plasticity. Modified plants can be as described in Section I herein above.

[0208] A yet additional aspect of the instant disclosure encompasses a method of stabilizing production of a metabolite, nucleic acid, or protein in a plant. The method comprising, generating or having generated a plant having reduced developmental plasticity; cultivating the plant for a time sufficient to generate the metabolite, nucleic acid, or protein; and harvesting the metabolite, nucleic acid, or protein from the plant. In some aspects, the plant is grown under intensive, precision outdoor farming conditions, TCEA, or vertical farming.

### V. Kits

[0209] A further aspect of the present disclosure provides kits for generating a modified, plant tissue, part thereof, plant cell, or seed having reduced developmental plasticity and improved agronomic traits. The kit can comprise one or more constructs for genetically modifying a plant to generate having reduced developmental plasticity and improved agronomic traits. The one or more constructs can modify a component of the circadian clock, modify an environmental signal sensor, or both in a plant. The kit can further comprise one or more modified plants, plant cells, or parts thereof comprising the one or more constructs can modify a component of the circadian clock, modify an environmental signal sensor, or both in a plant. The modified plants can be as described in Section I and the constructs can be as described in Sections III.

[0210] The kits can further comprise transfection reagents, cell growth media, selection media, in vitro transcription reagents, nucleic acid purification reagents, protein purification reagents, buffers, and the like. The kits provided herein generally include instructions for carrying out the methods detailed below. Instructions included in the kits can be affixed to packaging material or can be included as a package insert. While the instructions are typically written or printed materials, they are not limited to such. Any medium capable of storing such instructions and communicating them to an end user is contemplated by this disclosure. Such media include, but are not limited to, electronic storage media (e.g., magnetic discs, tapes, cartridges, chips), optical media (e.g., CD ROM), and the like. As used herein, the term “instructions” can include the address of an internet site that provides the instructions

### Definitions

[0211] Unless defined otherwise, all technical and scientific terms used herein have the meaning commonly understood by a person skilled in the art to which this invention belongs. The following references provide one of skill with a general definition of many of the terms used in this invention: Singleton et al., Dictionary of Microbiology and Molecular Biology (2nd ed. 1994); The Cambridge Dictionary of Science and Technology (Walker ed., 1988); The Glossary of Genetics, 5th Ed., R. Rieger et al. (eds.), Springer Verlag (1991); and Hale & Marham, The Harper Collins Dictionary of Biology (1991). As used herein, the following terms have the meanings ascribed to them unless specified otherwise.

[0212] When introducing elements of the present disclosure or the preferred aspects(s) thereof, the articles “a”, “an”, “the” and “said” are intended to mean that there are one or more of the elements. The terms “comprising”, “including” and “having” are intended to be inclusive and mean that there may be additional elements other than the listed elements.

[0213] The term “entrain” as used in the context of a circadian clock refers to the coupling of one rhythm to the same period as another cycle, for example, the resetting of a circadian rhythm from its free-running period to exactly the 24-h period of the day/night cycle.

[0214] A “genetically modified” or “modified” plant refers to a plant in which the nuclear, organellar or extrachromosomal nucleic acid sequences of a cell has been modified, i.e., the cell contains at least one nucleic acid sequence that has been engineered to contain an insertion of at least one nucleotide, a deletion of at least one nucleotide, and/or a substitution of at least one nucleotide.

[0215] As used herein, the term “gene” refers to a DNA region (including exons and introns) encoding a gene product, as well as all DNA regions which regulate the production of the gene product, whether or not such regulatory sequences are adjacent to coding and/or transcribed sequences. Accordingly, a gene includes, but is not necessarily limited to, promoter sequences, terminators, translational regulatory sequences such as ribosome binding sites and internal ribosome entry sites, enhancers, silencers, insulators, boundary elements, replication origins, matrix attachment sites, and locus control regions.

[0216] As used herein, the term “engineered” when applied to a targeting protein refers to targeting proteins modified to specifically recognize and bind to a nucleic acid sequence at or near a target nucleic acid locus.

[0217] The term “nucleic acid modification” refers to processes by which a specific nucleic acid sequence in a polynucleotide is changed such that the nucleic acid sequence is modified. The nucleic acid sequence may be modified to comprise an insertion of at least one nucleotide, a deletion of at least one nucleotide, and/or a substitution of at least one nucleotide. The modified nucleic acid sequence is inactivated such that no product is made. Alternatively, the nucleic acid sequence may be modified such that an altered product is made.

[0218] As used herein, “protein expression” includes but is not limited to one or more of the following: transcription of a gene into precursor mRNA; splicing and other processing of the precursor mRNA to produce mature mRNA; mRNA stability; translation of the mature mRNA into protein (including codon usage and tRNA availability); production of a mutant protein comprising a mutation that modifies the activity of the protein; and glycosylation and/or other modifications of the translation product, if required for proper expression and function.

[0219] The term “heterologous” refers to an entity that is not native to the cell or species of interest.

[0220] The terms “nucleic acid” and “polynucleotide” refer to a deoxyribonucleotide or ribonucleotide polymer, in linear or circular conformation. For the purposes of the present disclosure, these terms are not to be construed as limiting with respect to the length of a polymer. The terms may encompass known analogs of natural nucleotides, as well as nucleotides that are modified in the base, sugar and/or phosphate moieties. In general, an analog of a particular nucleotide has the same base-pairing specificity, i.e., an analog of A will base-pair with T. The nucleotides of a nucleic acid or polynucleotide may be linked by phosphodiester, phosphothioate, phosphoramidite, phosphorodiamidate bonds, or combinations thereof.

[0221] The term “nucleotide” refers to deoxyribonucleotides or ribonucleotides. The nucleotides may be standard nucleotides (i.e., adenosine, guanosine, cytidine, thymidine, and uridine) or nucleotide analogs. A nucleotide analog refers to a nucleotide having a modified purine or pyrimidine base or a modified ribose moiety. A nucleotide analog may be a naturally occurring nucleotide (e.g., inosine) or a non-naturally occurring nucleotide. Non-limiting examples of modifications on the sugar or base moieties of a nucleotide include the addition (or removal) of acetyl groups, amino groups, carboxyl groups, carboxymethyl groups, hydroxyl groups, methyl groups, phosphoryl groups, and thiol groups, as well as the substitution of the carbon and nitrogen atoms of the bases with other atoms (e.g., 7-deaza purines). Nucleotide analogs also include dideoxy nucleotides, 2′-O-methyl nucleotides, locked nucleic acids (LNA), peptide nucleic acids (PNA), and morpholinos.

[0222] The terms “polypeptide” and “protein” are used interchangeably to refer to a polymer of amino acid residues.

[0223] The term “allele” as used herein refers to one of two or more different nucleotide sequences that occur at a specific locus.

[0224] The terms “phenotype”, or “phenotypic trait” or “trait” refer to one or more traits of an organism. The phenotype can be observable to the naked eye, or by any other means of evaluation known in the art, e.g., microscopy, biochemical analysis, or an electromechanical assay. In some cases, a phenotype is directly controlled by a single gene or genetic locus, i.e., a “single gene trait”. In other cases, a phenotype is the result of several genes.

[0225] The term “genotype” is the genetic constitution of an individual (or group of individuals) at one or more genetic loci, as contrasted with the observable trait (the phenotype). Genotype is defined by the allele(s) of one or more known loci that the individual has inherited from its parents. The term genotype can be used to refer to an individual's genetic constitution at a single locus, at multiple led, or, more generally, the term genotype can be used to refer to an individual's genetic make-up for all the genes in its genome.

[0226] The term “heterozygous” means a genetic condition wherein different alleles reside at corresponding loci on homologous chromosomes.

[0227] The term “homozygous” means a genetic condition wherein identical alleles reside at corresponding loci on homologous chromosomes.

[0228] The term “hybrid” means a progeny of mating between at least two genetically dissimilar parents. Without limitation, examples of mating schemes include single crosses, modified single cross, double modified single cross, three-way cross, modified three-way cross, and double cross wherein at least one parent in a modified cross is the progeny of a cross between sister lines.

[0229] “Hybridization” or “nucleic acid hybridization” refers to the pairing of complementary RNA and DNA strands as well as the pairing of complementary DNA single strands.

[0230] The term “hybridize” means the formation of base pairs between complementary regions of nucleic acid strands.

[0231] The term “inbred” means a line that has been bred for genetic homogeneity.

[0232] A “plant” can be a whole plant, any part thereof, or a cell or tissue culture derived from a plant. Thus, the term “plant” can refer to any of: whole plants, plant components or organs (e.g., leaves, stems, roots, etc.), plant tissues, seeds, plant cells, and/or progeny of the same. A plant cell is a cell of a plant, taken from a plant, or derived through culture from a cell taken from a plant.

[0233] As various changes could be made in the above-described cells and methods without departing from the scope of the invention, it is intended that all matter contained in the above description and in the examples given below, shall be interpreted as illustrative and not in a limiting sense.

SEQUENCES

| SEQ | | | |
|---|---|---|---|
| ID | | | |
| NO. | Sequence | | Description |
| 1 | 1 | atgaagagag ggaaagatga ggagaagata ttggaaccta tgtttcctcg gcttcatgtg | Wild type A. |
| | 61 | aatgatgcag ataaaggagg gcctagagct cctcctagaa acaagatggc tctttatgag | thaliana ELF3 |
| | 121 | cagcttagta ttccttctca gaggtttggt gatcatggaa cgatgaattc tcgtagtaac | cDNA sequence |
| | 181 | aacacaagca ctttggttca tcctggacca tctagtcagc cttgtggtgt ggaaagaaac | |
| | 241 | ttatctgtcc agcatcttga ttcttcagcc gcaaaccaag caactgagaa gtttgtctcc | |
| | 301 | caaatgtcct tcatggaaaa tgtgagatct tcggcacagc atgatcagag gaaaatggtg | |
| | 361 | agagaggaag aagattttgc agttccagta tatattaact caagaagatc tcagtctcat | |
| | 421 | ggcagaacca agagtggtat tgagaaggaa aaacacaccc caatggtggc acctagctct | |
| | 481 | catcactcca ttcgatttca agaagtgaat cagacaggct caaagcaaaa cgtatgtttg | |
| | 541 | gctacttgtt caaaacctga agttagggat caggtcaagg cgaatgcaag gtcaggtggc | |
| | 601 | tttgtaatct ctttagatgt atcagtcaca gaggagattg atctcgaaaa atcagcatca | |
| | 661 | agtcatgata gagtaaatga ttataatgct tccttgagac aagagtctag aaatcggtta | |
| | 721 | taccgagatg gtggcaaaac tcgtctgaag gacactgata atggagctga atctcacttg | |
| | 781 | gcaacggaaa atcattcaca agagggtcat ggcagtcctg aagacattga taatgatcgt | |
| | 841 | gaatacagca aaagcagagc atgcgcctct ctgcagcaga taaatgaaga ggcaagtgat | |
| | 901 | gacgtttctg atgattcgat ggtggattct atatccagca tagatgtctc tcccgatgat | |
| | 961 | gttgtgggta tattaggtca aaaacgtttc tggagagcaa ggaaagccat tgccaatcaa | |
| | 1021 | caaagagtat ttgctgttca actatttgag ttgcacagac tgattaaggt tcaaaaactt | |
| | 1081 | attgctgcat caccggatct cttgctcgat gagatcagtt ttcttggaaa agtttctgct | |
| | 1141 | aaaagctatc cagtgaagaa gctccttcca tcagaatttc tggtaaagcc tcctctacca | |
| | 1201 | catgttgtcg tcaaacaaag gggtgactcg gagaagactg accaacataa aatggaaagc | |
| | 1261 | tcagctgaga acgtagttgg gaggttgtca aatcaaggtc atcatcaaca atccaactac | |
| | 1321 | atgccttttg caaacaaccc accggcttca ccggctccaa atggatattg ctttcctcct | |
| | 1381 | cagcctcctc cttcaggaaa tcatcagcaa tggttgatcc ctgtaatgtc tccctcggaa | |
| | 1441 | ggactgatat acaagcctca cccaggtatg gcacacacgg ggcattatgg aggatattat | |
| | 1501 | ggtcattata tgcctacacc aatggtaatg cctcaatatc accccggcat gggattccca | |
| | 1561 | cctcctggta atggctactt ccctccatat ggaatgatgc ccaccataat gaacccatat | |
| | 1621 | tgttcaagcc aacaacaaca acaacaacaa cccaatgagc aaatgaacca gtttggacat | |
| | 1681 | cctggaaatc ttcagaacac ccaacaacaa caacagagat ctgataatga acctgctcca | |
| | 1741 | cagcaacagc aacagccaac aaagtcttat ccgcgagcaa gaaagagcag gcaagggagc | |
| | 1801 | acaggaagca gtccaagtgg gccacaggga atctctggta gcaagtcctt tcggccattc | |
| | 1861 | gcagccgttg atgaggacag caacatcaac aatgcacctg agcaaacgat gacaacaacc | |
| | 1921 | acaacgacga caagaacaac tgttactcag acaacaagag atgggggagg agtgacgaga | |
| | 1981 | gtgataaagg tggtacctca caacgcaaag ctcgcgagtg agaatgctgc cagaattttc | |
| | 2041 | cagtcaatac aagaagaacg taaacgctat gactcctcta agccttaa | |
| 2 | MKRGKDEEKILEPMFPRLHVNDADKGGPRAPPRNKMALYEQLSIPSQRFGDHGTMNSRSNNTSTLVHPGPS | | Wild type A. |
| | SQPCGVERNLSVQHLDSSAANQATEKFVSQMSFMENVRSSAQHDQRKMVREEEDFAVPVYINSRRSQSHGR | | thaliana ELF3 |
| | TKSGIEKEKHTPMVAPSSHHSIRFQEVNQTGSKQNVCLATCSKPEVRDQVKANARSGGFVISLDVSVTEEI | | protein |
| | DLEKSASSHDRVNDYNASLRQESRNRLYRDGGKTRLKDTDNGAESHLATENHSQEGHGSPEDIDNDREYSK | | |
| | SRACASLQQINEEASDDVSDDSMVDSISSIDVSPDDVVGILGQKRFWRARKAIANQQRVFAVQLFELHRLI | | |
| | KVQKLIAASPDLLLDEISFLGKVSAKSYPVKKLLPSEFLVKPPLPHVVVKQRGDSEKTDQHKMESSAENVV | | |
| | GRLSNQGHHQQSNYMPFANNPPASPAPNGYCFPPQPPPSGNHQQWLIPVMSPSEGLIYKPHPGMAHTGHYG | | |
| | GYYGHYMPTPMVMPQYHPGMGFPPPGNGYFPPYGMMPTIMNPYCSSQQQQQQQPNEQMNQFGHPGNLQNTQ | | |
| | QQQQRSDNEPAPQQQQQPTKSYPRARKSRQGSTGSSPSGPQGISGSKSFRPFAAVDEDSNINNAPEQTMTT | | |
| | TTTTTRTTVTQTTRDGGGVTRVIKVVPHNAKLASENAARIFQSIQEERKRYDSSKP- | | |
| 3 | 1 | atgaagagag ggaaagatga ggagaagata ttggaaccta tgtttcctcg gcttcatgtg | Elf3-1 mutant |
| | 61 | aatgatgcag ataaaggagg gcctagagct cctcctagaa acaagatggc tctttatgag | allele of A. |
| | 121 | cagcttagta ttccttctca gaggtttggt gatcatggaa cgatgaattc tcgtagtaac | thaliana |
| | 181 | aacacaagca ctttggttca tcctggacca tctagtcagc cttgtggtgt ggaaagaaac | (converts |
| | 241 | ttatctgtcc agcatcttga ttcttcagcc gcaaaccaag caactgagaa gtttgtctcc | nucleotide |
| | 301 | caaatgtcct tcatggaaaa tgtgagatct tcggcacagc atgatcagag gaaaatggtg | 1309C to T, |
| | 361 | agagaggaag aagattttgc agttccagta tatattaact caagaagatc tcagtctcat | converts Q 437 |
| | 421 | ggcagaacca agagtggtat tgagaaggaa aaacacaccc caatggtggc acctagctct | to stop) |
| | 481 | catcactcca ttcgatttca agaagtgaat cagacaggct caaagcaaaa cgtatgtttg | |
| | 541 | gctacttgtt caaaacctga agttagggat caggtcaagg cgaatgcaag gtcaggtggc | |
| | 601 | tttgtaatct ctttagatgt atcagtcaca gaggagattg atctcgaaaa atcagcatca | |
| | 661 | agtcatgata gagtaaatga ttataatgct tccttgagac aagagtctag aaatcggtta | |
| | 721 | taccgagatg gtggcaaaac tcgtctgaag gacactgata atggagctga atctcacttg | |
| | 781 | gcaacggaaa atcattcaca agagggtcat ggcagtcctg aagacattga taatgatcgt | |
| | 841 | gaatacagca aaagcagagc atgcgcctct ctgcagcaga taaatgaaga ggcaagtgat | |
| | 901 | gacgtttctg atgattcgat ggtggattct atatccagca tagatgtctc tcccgatgat | |
| | 961 | gttgtgggta tattaggtca aaaacgtttc tggagagcaa ggaaagccat tgccaatcaa | |
| | 1021 | caaagagtat ttgctgttca actatttgag ttgcacagac tgattaaggt tcaaaaactt | |
| | 1081 | attgctgcat caccggatct cttgctcgat gagatcagtt ttcttggaaa agtttctgct | |
| | 1141 | aaaagctatc cagtgaagaa gctccttcca tcagaatttc tggtaaagcc tcctctacca | |
| | 1201 | catgttgtcg tcaaacaaag gggtgactcg gagaagactg accaacataa aatggaaagc | |
| | 1261 | tcagctgaga acgtagttgg gaggttgtca aatcaaggtc atcatcaata atccaactac | |
| | 1321 | atgccttttg caaacaaccc accggcttca ccggctccaa atggatattg ctttcctcct | |
| | 1381 | cagcctcctc cttcaggaaa tcatcagcaa tggttgatcc ctgtaatgtc tccctcggaa | |
| | 1441 | ggactgatat acaagcctca cccaggtatg gcacacacgg ggcattatgg aggatattat | |
| | 1501 | ggtcattata tgcctacacc aatggtaatg cctcaatatc accccggcat gggattccca | |
| | 1561 | cctcctggta atggctactt ccctccatat ggaatgatgc ccaccataat gaacccatat | |
| | 1621 | tgttcaagcc aacaacaaca acaacaacaa cccaatgagc aaatgaacca gtttggacat | |
| | 1681 | cctggaaatc ttcagaacac ccaacaacaa caacagagat ctgataatga acctgctcca | |
| | 1741 | cagcaacagc aacagccaac aaagtcttat ccgcgagcaa gaaagagcag gcaagggagc | |
| | 1801 | acaggaagca gtccaagtgg gccacaggga atctctggta gcaagtcctt tcggccattc | |
| | 1861 | gcagccgttg atgaggacag caacatcaac aatgcacctg agcaaacgat gacaacaacc | |
| | 1921 | acaacgacga caagaacaac tgttactcag acaacaagag atgggggagg agtgacgaga | |
| | 1981 | gtgataaagg tggtacctca caacgcaaag ctcgcgagtg agaatgctgc cagaattttc | |
| | 2041 | cagtcaatac aagaagaacg taaacgctat gactcctcta agccttaa | |
| 4 | 1 | atgaagagag ggaaagatga ggagaagata ttggaaccta tgtttcctcg gcttcatgtg | ELF3-2 mutant |
| | 61 | aatgatgcag ataaaggagg gcctagagct cctcctagaa acaagatggc tctttatgag | sequence of A. |
| | 121 | cagcttagta ttccttctca gaggtttggt gatcatggaa cgatgaattc tcgtagtaac | thaliana |
| | 181 | aacacaagca ctttggttca tcctggacca tctagtcagc cttgtggtgt ggaaagaaac | (nucleotide 101 |
| | 241 | ttatctgtcc agcatcttga ttcttcagcc gcaaaccaag caactgagaa gtttgtctcc | 7 T to G |
| | 301 | caaatgtcct tcatggaaaa tgtgagatct tcggcacagc atgatcagag gaaaatggtg | converting N339 |
| | 361 | agagaggaag aagattttgc agttccagta tatattaact caagaagatc tcagtctcat | to K, |
| | 421 | ggcagaacca agagtggtat tgagaaggaa aaacacaccc caatggtggc acctagctct | and Nucleotide |
| | 481 | catcactcca ttcgatttca agaagtgaat cagacaggct caaagcaaaa cgtatgtttg | 1018 C to T, |
| | 541 | gctacttgtt caaaacctga agttagggat caggtcaagg cgaatgcaag gtcaggtggc | converts Q340 |
| | 601 | tttgtaatct ctttagatgt atcagtcaca gaggagattg atctcgaaaa atcagcatca | to stop, |
| | 661 | agtcatgata gagtaaatga ttataatgct tccttgagac aagagtctag aaatcggtta | followed by |
| | 721 | taccgagatg gtggcaaaac tcgtctgaag gacactgata atggagctga atctcacttg | insertion of |
| | 781 | gcaacggaaa atcattcaca agagggtcat ggcagtcctg aagacattga taatgatcgt | unknown length) |
| | 841 | gaatacagca aaagcagagc atgcgcctct ctgcagcaga taaatgaaga ggcaagtgat | |
| | 901 | gacgtttctg atgattcgat ggtggattct atatccagca tagatgtctc tcccgatgat | |
| | 961 | gttgtgggta tattaggtca aaaacgtttc tggagagcaa ggaaagccat tgccaagtaa | |
| | 1021 | gttcactaga aatttacagt ttggttattt attctccgct ctttctattt atctccttct | |
| | 1081 | ttgataccaa cattttttgc ttgaaagaag ttaatattta agcattgttc cgtagtctta | |
| | 1141 | ctgaagcttt ttcctctgtt gttttttgct attttcattg aggactgtgg tagggcatat | |
| | 1201 | ttcactatca ccaaatttca aatttctaga acactctcct tcatattttt ttttcatgat | |
| | 1261 | taatgctgca attgattgct gatatacata tatgactatt tgtttcagct cgagaagaaa | |
| | 1321 | caaatactca tggaaacata tgagaaggtt tctgaatgac tttaccttaa tcagtctggt | |
| | 1381 | gcaactcaaa tagttgaaca gcaaaatact ctttggtgac tggtaatgga gaaacagagt | |
| | 1441 | c | |
| 5 | 1 | atggtttccg gagtcggggg tagtggcggt ggccgtggcg gtggccgtgg cggagaagaa | A. thaliana |
| | 61 | gaaccgtcgt caagtcacac tcctaataac cgaagaggag gagaacaagc tcaatcgtcg | PhyB wild type |
| | 121 | ggaacgaaat ctctcagacc aagaagcaac actgaatcaa tgagcaaagc aattcaacag | |
| | 181 | tacaccgtcg acgcaagact ccacgccgtt ttcgaacaat ccggcgaatc agggaaatca | |
| | 241 | ttcgactact cacaatcact caaaacgacg acgtacggtt cctctgtacc tgagcaacag | |
| | 301 | atcacagctt atctctctcg aatccagcga ggtggttaca ttcagccttt cggatgtatg | |
| | 361 | atcgccgtcg atgaatccag tttccggatc atcggttaca gtgaaaacgc cagagaaatg | |
| | 421 | ttagggatta tgcctcaatc tgttcctact cttgagaaac ctgagattct agctatggga | |
| | 481 | actgatgtga gatctttgtt cacttcttcg agctcgattc tactcgagcg tgctttcgtt | |
| | 541 | gctcgagaga ttaccttgtt aaatccggtt tggatccatt ccaagaatac tggtaaaccg | |
| | 601 | ttttacgcca ttcttcatag gattgatgtt ggtgttgtta ttgatttaga gccagctaga | |
| | 661 | actgaagatc ctgcgctttc tattgctggt gctgttcaat cgcagaaact cgcggttcgt | |
| | 721 | gcgatttctc agttacaggc tcttcctggt ggagatatta agcttttgtg tgacactgtc | |
| | 781 | gtggaaagtg tgagggactt gactggttat gatcgtgtta tggtttataa gtttcatgaa | |
| | 841 | gatgagcatg gagaagttgt agctgagagt aaacgagatg atttagagcc ttatattgga | |
| | 901 | ctgcattatc ctgctactga tattcctcaa gcgtcaaggt tcttgtttaa gcagaaccgt | |
| | 961 | gtccgaatga tagtagattg caatgccaca cctgttcttg tggtccagga cgataggcta | |
| | 1021 | actcagtcta tgtgcttggt tggttctact cttagggctc ctcatggttg tcactctcag | |
| | 1081 | tatatggcta acatgggatc tattgcgtct ttagcaatgg cggttataat caatggaaat | |
| | 1141 | gaagatgatg ggagcaatgt agctagtgga agaagctcga tgaggctttg gggtttggtt | |
| | 1201 | gtttgccatc acacttcttc tcgctgcata ccgtttccgc taaggtatgc ttgtgagttt | |
| | 1261 | ttgatgcagg ctttcggttt acagttaaac atggaattgc agttagcttt gcaaatgtca | |
| | 1321 | gagaaacgcg ttttgagaac gcagacactg ttatgtgata tgcttctgcg tgactcgcct | |
| | 1381 | gctggaattg ttacacagag tcccagtatc atggacttag tgaaatgtga cggtgcagca | |
| | 1441 | tttctttacc acgggaagta ttacccgttg ggtgttgctc ctagtgaagt tcagataaaa | |
| | 1501 | gatgttgtgg agtggttgct tgcgaatcat gcggattcaa ccggattaag cactgatagt | |
| | 1561 | ttaggcgatg cggggtatcc cggtgcagct gcgttagggg atgctgtgtg cggtatggca | |
| | 1621 | gttgcatata tcacaaaaag agactttctt ttttggtttc gatctcacac tgcgaaagaa | |
| | 1681 | atcaaatggg gaggcgctaa gcatcatccg gaggataaag atgatgggca acgaatgcat | |
| | 1741 | cctcgttcgt cctttcaggc ttttcttgaa gttgttaaga gccggagtca gccatgggaa | |
| | 1801 | actgcggaaa tggatgcgat tcactcgctc cagcttattc tgagagactc ttttaaagaa | |
| | 1861 | tctgaggcgg ctatgaactc taaagttgtg gatggtgtgg ttcagccatg tagggatatg | |
| | 1921 | gcgggggaac aggggattga tgagttaggt gcagttgcaa gagagatggt taggctcatt | |
| | 1981 | gagactgcaa ctgttcctat attcgctgtg gatgccggag gctgcatcaa tggatggaac | |
| | 2041 | gctaagattg cagagttgac aggtctctca gttgaagaag ctatggggaa gtctctggtt | |
| | 2101 | tctgatttaa tatacaaaga gaatgaagca actgtcaata agcttctttc tcgtgctttg | |
| | 2161 | agaggggacg aggaaaagaa tgtggaggtt aagctgaaaa ctttcagccc cgaactacaa | |
| | 2221 | gggaaagcag tttttgtggt tgtgaatgct tgttccagca aggactactt gaacaacatt | |
| | 2281 | gtcggcgttt gttttgttgg acaagacgtt actagtcaga aaatcgtaat ggataagttc | |
| | 2341 | atcaacatac aaggagatta caaggctatt gtacatagcc caaaccctct aatcccgcca | |
| | 2401 | atttttgctg ctgacgagaa cacgtgctgc ctggaatgga acatggcgat ggaaaagctt | |
| | 2461 | acgggttggt ctcgcagtga agtgattggg aaaatgattg tcggggaagt gtttgggagc | |
| | 2521 | tgttgcatgc taaagggtcc tgatgcttta accaagttca tgattgtatt gcataatgcg | |
| | 2581 | attggtggcc aagatacgga taagttccct ttcccattct ttgaccgcaa tgggaagttt | |
| | 2641 | gttcaggctc tattgactgc aaacaagcgg gttagcctcg agggaaaggt tattggggct | |
| | 2701 | ttctgtttct tgcaaatccc gagccctgag ctgcagcaag ctttagcagt ccaacggagg | |
| | 2761 | caggacacag agtgtttcac gaaggcaaaa gagttggctt atatttgtca ggtgataaag | |
| | 2821 | aatcctttga gcggtatgcg tttcgcaaac tcattgttgg aggccacaga cttgaacgag | |
| | 2881 | gaccagaagc agttacttga aacaagtgtt tcttgcgaga aacagatctc aaggatcgtc | |
| | 2941 | ggggacatgg atcttgaaag cattgaagac ggttcatttg tgctaaagag ggaagagttt | |
| | 3001 | ttccttggaa gtgtcataaa cgcgattgta agtcaagcga tgttcttatt aagggacaga | |
| | 3061 | ggtcttcagc tgatccgtga cattcccgaa gagatcaaat caatagaggt ttttggagac | |
| | 3121 | cagataagga ttcaacagct cctggctgag tttctgctga gtataatccg gtatgcacca | |
| | 3181 | tctcaagagt gggtggagat ccatttaagc caactttcaa agcaaatggc tgatggattc | |
| | 3241 | gccgccatcc gcacagaatt cagaatggcg tgtccaggtg aaggtctgcc tccagagcta | |
| | 3301 | gtccgagaca tgttccatag cagcaggtgg acaagccctg aaggtttagg tctaagcgta | |
| | 3361 | tgtcgaaaga ttttaaagct aatgaacggt gaggttcaat acatccgaga atcagaacgg | |
| | 3421 | tcctatttcc tcatcattct ggaactccct gtacctcgaa agcgaccatt gtcaactgct | |
| | 3481 | agtggaagtg gtgacatgat gctgatgatg ccatattag | |
| 6 | MVSGVGGSGGGRGGGRGGEEEPSSSHTPNNRRGGEQAQSSGTKSLRPRSNTESMSKAIQQYTVDARLHAVE | | A. thaliana |
| | EQSGESGKSFDYSQSLKTTTYGSSVPEQQITAYLSRIQRGGYIQPFGCMIAVDESSFRIIGYSENAREMLG | | PhyB wild typc |
| | IMPQSVPTLEKPEILAMGTDVRSLFTSSSSILLERAFVAREITLLNPVWIHSKNTGKPFYAILHRIDVGVV | | prctcin |
| | IDLEPARTEDPALSIAGAVQSQKLAVRAISQLQALPGGDIKLLCDTVVESVRDLTGYDRVMVYKFHEDEHG | | |
| | EVVAESKRDDLEPYIGLHYPATDIPQASRFLFKONRVRMIVDCNATPVLVVODDRLTQSMCLVGSTLRAPH | | |
| | GCHSQYMANMGSIASLAMAVIINGNEDDGSNVASGRSSMRLWGLVVCHHTSSRCIPFPLRYACEFLMQAFG | | |
| | LOLNMELQLALQMSEKRVLRTQTLLCDMLLRDSPAGIVTQSPSIMDLVKCDGAAFLYHGKYYPLGVAPSEV | | |
| | QIKDVVEWLLANHADSTGLSTDSLGDAGYPGAAALGDAVCGMAVAYITKRDFLFWFRSHTAKEIKWGGAKH | | |
| | HPEDKDDGORMHPRSSFQAFLEVVKSRSQPWETAEMDAIHSLOLILRDSFKESEAAMNSKVVDGVVQPCRD | | |
| | MAGEQGIDELGAVAREMVRLIETATVPIFAVDAGGCINGWNAKIAELTGLSVEEAMGKSLVSDLIYKENEA | | |
| | TVNKLLSRALRGDEEKNVEVKLKTFSPELQGKAVFVVVNACSSKDYLNNIVGVCFVGQDVTSQKIVMDKFI | | |
| | NIQGDYKAIVHSPNPLIPPIFAADENTCCLEWNMAMEKLTGWSRSEVIGKMIVGEVFGSCCMLKGPDALTK | | |
| | EMIVLHNAIGGQDTDKFPFPFFDRNGKFVQALLTANKRVSLEGKVIGAFCFLQIPSPELQQALAVORRODT | | |
| | ECFTKAKELAYICQVIKNPLSGMRFANSLLEATDLNEDQKOLLETSVSCEKQISRIVGDMDLESIEDGSFV | | |
| | LKREEFFLGSVINAIVSQAMFLLRDRGLOLIRDIPEEIKSIEVFGDQIRIQQLLAEFLLSIIRYAPSQEWV | | |
| | EIHLSQLSKQMADGFAAIRTEFRMACPGEGLPPELVRDMFHSSRWTSPEGLGLSVCRKILKLMNGEVQYIR | | |
| | ESERSYFLIILELPVPRKRPLSTASGSGDMMLMMPY- | | |
| 7 | 1 | atggtttccg gagtcggggg tagtggcggt ggccgtggcg gtggccgtgg cggagaagaa | YHB allele of |
| | 61 | gaaccgtcgt caagtcacac tcctaataac cgaagaggag gagaacaagc tcaatcgtcg | A. thaliana |
| | 121 | ggaacgaaat ctctcagacc aagaagcaac actgaatcaa tgagcaaagc aattcaacag | phyB. Comprises |
| | 181 | tacaccgtcg acgcaagact ccacgccgtt ttcgaacaat ccggcgaatc agggaaatca | a Y276H |
| | 241 | ttcgactact cacaatcact caaaacgacg acgtacggtt cctctgtacc tgagcaacag | mutation. |
| | 301 | atcacagctt atctctctcg aatccagcga ggtggttaca ttcagccttt cggatgtatg | Constitutively |
| | 361 | atcgccgtcg atgaatccag tttccggatc atcggttaca gtgaaaacgc cagagaaatg | active |
| | 421 | ttagggatta tgcctcaatc tgttcctact cttgagaaac ctgagattct agctatggga | |
| | 481 | actgatgtga gatctttgtt cacttcttcg agctcgattc tactcgagcg tgctttcgtt | |
| | 541 | gctcgagaga ttaccttgtt aaatccggtt tggatccatt ccaagaatac tggtaaaccg | |
| | 601 | ttttacgcca ttcttcatag gattgatgtt ggtgttgtta ttgatttaga gccagctaga | |
| | 661 | actgaagatc ctgcgctttc tattgctggt gctgttcaat cgcagaaact cgcggttcgt | |
| | 721 | gcgatttctc agttacaggc tcttcctggt ggagatatta agcttttgtg tgacactgtc | |
| | 781 | gtggaaagtg tgagggactt gactggttat gatcgtgtta tggttcataa gtttcatgaa | |
| | 841 | gatgagcatg gagaagttgt agctgagagt aaacgagatg atttagagcc ttatattgga | |
| | 901 | ctgcattatc ctgctactga tattcctcaa gcgtcaaggt tcttgtttaa gcagaaccgt | |
| | 961 | gtccgaatga tagtagattg caatgccaca cctgttcttg tggtccagga cgataggcta | |
| | 1021 | actcagtcta tgtgcttggt tcgttctact cttagggctc ctcatggttg tractctcag | |
| | 1081 | tatatggcta acatgggatc tattgcgtct ttagcaatgg cggttataat caatggaaat | |
| | 1141 | gaagatgatg ggagcaatgt agctagtgga agaagctcga tgaggctttg gggtttggtt | |
| | 1201 | gtttgccatc acacttcttc tcgctgcata ccgtttccgc taaggtatgc ttgtgagttt | |
| | 1261 | ttgatgcagg ctttcggttt acagttaaac atggaattgc agttagcttt gcaaatgtca | |
| | 1321 | gagaaacgcg ttttgagaac gcagacactg ttatgtgata tgcttctgcg tgactcgcct | |
| | 1381 | gctggaattg ttacacagag tcccagtatc atggacttag tgaaatgtga cggtgcagca | |
| | 1441 | tttctttacc acgggaagta ttacccgttg ggtgttgctc ctagtgaagt tcagataaaa | |
| | 1501 | gatgttgtgg agtggttgct tgcgaatcat gcggattcaa ccggattaag cactgatagt | |
| | 1561 | ttaggcgatg cggggtatcc cggtgcagct gcgttagggg atgctgtgtg cggtatggca | |
| | 1621 | gttgcatata tcacaaaaag agactttctt ttttggtttc gatctcacac tgcgaaagaa | |
| | 1681 | atcaaatggg gaggcgctaa gcatcatccg gaggataaag atgatgggca acgaatgcat | |
| | 1741 | cctcgttcgt cctttcaggc ttttcttgaa gttgttaaga gccggagtca gccatgggaa | |
| | 1801 | actgcggaaa tggatgcgat tcactcgctc cagcttattc tgagagactc ttttaaagaa | |
| | 1861 | tctgaggcgg ctatgaactc taaagttgtg gatggtgtgg ttcagccatg tagggatatg | |
| | 1921 | gcgggggaac aggggattga tgagttaggt gcagttgcaa gagagatggt taggctcatt | |
| | 1981 | gagactgcaa ctgttcctat attcgctgtg gatgccggag gctgcatcaa tggatggaac | |
| | 2041 | gctaagattg cagagttgac aggtctctca gttgaagaag ctatggggaa gtctctggtt | |
| | 2101 | tctgatttaa tatacaaaga gaatgaagca actgtcaata agcttctttc tcgtgctttg | |
| | 2161 | agaggggacg aggaaaagaa tgtggaggtt aagctgaaaa ctttcagccc cgaactacaa | |
| | 2221 | gggaaagcag tttttgtggt tgtgaatgct tgttccagca aggactactt gaacaacatt | |
| | 2281 | gtcggcgttt gttttgttgg acaagacgtt actagtcaga aaatcgtaat ggataagttc | |
| | 2341 | atcaacatac aaggagatta caaggctatt gtacatagcc caaaccctct aatcccgcca | |
| | 2401 | atttttgctg ctgacgagaa cacgtgctgc ctggaatgga acatggcgat ggaaaagctt | |
| | 2461 | acgggttggt ctcgcagtga agtgattggg aaaatgattg tcggggaagt gtttgggagc | |
| | 2521 | tgttgcatgc taaagggtcc tgatgcttta accaagttca tgattgtatt gcataatgcg | |
| | 2581 | attggtggcc aagatacgga taagttccct ttcccattct ttgaccgcaa tgggaagttt | |
| | 2641 | gttcaggctc tattgactgc aaacaagcgg gttagcctcg agggaaaggt tattggggct | |
| | 2701 | ttctgtttct tgcaaatccc gagccctgag ctgcagcaag ctttagcagt ccaacggagg | |
| | 2761 | caggacacag agtgtttcac gaaggcaaaa gagttggctt atatttgtca ggtgataaag | |
| | 2821 | aatcctttga gcggtatgcg tttcgcaaac tcattgttgg aggccacaga cttgaacgag | |
| | 2881 | gaccagaagc agttacttga aacaagtgtt tcttgcgaga aacagatctc aaggatcgtc | |
| | 2941 | ggggacatgg atcttgaaag cattgaagac ggttcatttg tgctaaagag ggaagagttt | |
| | 3001 | ttccttggaa gtgtcataaa cgcgattgta agtcaagcga tgttcttatt aagggacaga | |
| | 3061 | ggtcttcagc tgatccgtga cattcccgaa gagatcaaat caatagaggt ttttggagac | |
| | 3121 | cagataagga ttcaacagct cctggctgag tttctgctga gtataatccg gtatgcacca | |
| | 3181 | tctcaagagt gggtggagat ccatttaagc caactttcaa agcaaatggc tgatggattc | |
| | 3241 | gccgccatcc gcacagaatt cagaatggcg tgtccaggtg aaggtctgcc tccagagcta | |
| | 3301 | gtccgagaca tgttccatag cagcaggtgg acaagccctg aaggtttagg tctaagcgta | |
| | 3361 | tgtcgaaaga ttttaaagct aatgaacggt gaggttcaat acatccgaga atcagaacgg | |
| | 3421 | tcctatttcc tcatcattct ggaactccct gtacctcgaa agcgaccatt gtcaactgct | |
| | 3481 | agtggaagtg gtgacatgat gctgatgatg ccatattag | |
| 8 | MVSGVGGSGGGRGGGRGGEEEPSSSHTPNNRRGGEQAQSSGTKSLRPRSNTESMSKAIQQYTVDARLHAVE | | A. thaliana |
| | EQSGESGKSFDYSQSLKTTTYGSSVPEQQITAYLSRIQRGGYIQPFGCMIAVDESSFRIIGYSENAREMLG | | PHY-B protein |
| | IMPQSVPTLEKPEILAMGTDVRSLFTSSSSILLERAFVAREITLLNPVWIHSKNTGKPFYAILHRIDVGVV | | encoddd by YHB |
| | IDLEPARTEDPALSIAGAVQSQKLAVRAISQLQALPGGDIKLLCDTVVESVRDLTGYDRVMVHKFHEDEHG | | allele of phyB |
| | EVVAESKRDDLEPYIGLHYPATDIPOASRFLFKONRVRMIVDCNATPVLVVQDDRLTQSMCLVGSTLRAPH | | |
| | GCHSQYMANMGSIASLAMAVIINGNEDDGSNVASGRSSMRLWGLVVCHHTSSRCIPFPLRYACEFLMQAFG | | |
| | LOLNMELQLALQMSEKRVLRTOTLLCDMLLRDSPAGIVTQSPSIMDLVKCDGAAFLYHGKYYPLGVAPSEV | | |
| | QIKDVVEWLLANHADSTGLSTDSLGDAGYPGAAALGDAVCGMAVAYITKRDFLFWFRSHTAKEIKWGGAKH | | |
| | HPEDKDDGQRMHPRSSFQAFLEVVKSRSQPWETAEMDAIHSLQLILRDSFKESEAAMNSKVVDGVVQPCRD | | |
| | MAGEQGIDELGAVAREMVRLIETATVPIFAVDAGGCINGWNAKIAELTGLSVEEAMGKSLVSDLIYKENEA | | |
| | TVNKLLSRALRGDEEKNVEVKLKTFSPELQGKAVFVVVNACSSKDYLNNIVGVCFVGQDVTSQKIVMDKFI | | |
| | NIQGDYKAIVHSPNPLIPPIFAADENTCCLEWNMAMEKLTGWSRSEVIGKMIVGEVFGSCCMLKGPDALTK | | |
| | FMIVLHNAIGGQDTDKFPFPFFDRNGKFVQALLTANKRVSLEGKVIGAFCFLQIPSPELQQALAVORRODT | | |
| | ECFTKAKELAYICQVIKNPLSGMRFANSLLEATDLNEDQKOLLETSVSCEKQISRIVGDMDLESIEDGSFV | | |
| | LKREEFFLGSVINAIVSQAMFLLRDRGLQLIRDIPEEIKSIEVFGDQIRIQQLLAEFLLSIIRYAPSQEWV | | |
| | EIHLSQLSKOMADGFAAIRTEFRMACPGEGLPPELVRDMFHSSRWTSPEGLGLSVCRKILKLMNGEVQYIR | | |
| | ESERSYFLIILELPVPRKRPLSTASGSGDMMLMMPY- | | |
| 9 | 1 | atggtttccg gagtcggggg tagtggcggt ggccgtggcg gtggccgtgg cggagaagaa | A. t. loss of |
| | 61 | gaaccgtcgt caagtcacac tcctaataac cgaagaggag gagaacaagc tcaatcgtcg | function phyB 9 |
| | 121 | ggaacgaaat ctctcagacc aagaagcaac actgaatcaa tgagcaaagc aattcaacag | mutant cDNA |
| | 181 | tacaccgtcg acgcaagact ccacgccgtt ttcgaacaat ccggcgaatc agggaaatca | sequence has a |
| | 241 | ttcgactact cacaatcact caaaacgacg acgtacggtt cctctgtacc tgagcaacag | G to A mutation |
| | 301 | atcacagctt atctctctcg aatccagcga ggtggttaca ttcagccttt cggatgtatg | at nucleotide |
| | 361 | atcgccgtcg atgaatccag tttccggatc atcggttata gtgaaaacgc cagagaaatg | 3489 that |
| | 421 | ttagggatta tgcctcaatc tgttcctact cttgagaaac ctgagattct agctatggga | changes a |
| | 481 | actgatgtga gatctttgtt cacttcttcg agctcgattc tactcgagcg tgctttcgtt | tryptophan |
| | 541 | gctcgagaga ttaccttgtt aaatccggtt tggatccatt ccaagaatac tggtaaaccg | codon to a stop |
| | 601 | ttttacgcca ttcttcatag gattgatgtt ggtgttgtta ttgatttaga gccagctaga | codon at amino |
| | 661 | actgaagatc ctgcgctttc tattgctggt gctgttcaat cgcagaaact cgcggttcgt | acid position |
| | 721 | gcgatttctc agttacaggc tcttcctggt ggagatatta agcttttgtg tgacactgtc | 398 |
| | 781 | gtggaaagtg tgagggactt gactggttat gatcgtgtta tggtttataa gtttcatgaa | |
| | 841 | gatgagcatg gagaagttgt agctgagagt aaacgagatg atttagagcc ttatattgga | |
| | 901 | ctgcattatc ctgctactga tattcctcaa gcgtcaaggt tcttgtttaa gcagaaccgt | |
| | 961 | gtccgaatga tagtagattg caatgccaca cctgttcttg tggtccagga cgataggcta | |
| | 1021 | actcagtcta tgtgcttggt tggttctact cttagggctc ctcatggttg tcactctcag | |
| | 1081 | tatatggcta acatgggatc tattgcgtct ttagcaatgg cggttataat caatggaaat | |
| | 1141 | gaagatgatg ggagcaatgt agctagtgga agaagctcga tgaggctttg aggtttggtt | |
| | 1201 | gtttgccatc acacttcttc tcgctgcata ccgtttccgc taaggtatgc ttgtgagttt | |
| | 1261 | ttgatgcagg ctttcggttt acagttaaac atggaattgc agttagcttt gcaaatgtca | |
| | 1321 | gagaaacgcg ttttgagaac gcagacactg ttatgtgata tgcttctgcg tgactcgcct | |
| | 1381 | gctggaattg ttacacagag tcccagtatc atggacttag tgaaatgtga cggtgcagca | |
| | 1441 | tttctttacc acgggaagta ttacccgttg ggtgttgctc ctagtgaagt tcagataaaa | |
| | 1501 | gatgttgtgg agtggttgct tgcgaatcat gcggattcaa ccggattaag cactgatagt | |
| | 1561 | ttaggcgatg cggggtatcc cggtgcagct gcgttagggg atgctgtgtg cggtatggca | |
| | 1621 | gttgcatata tcacaaaaag agactttctt ttttggtttc gatctcacac tgcgaaagaa | |
| | 1681 | atcaaatggg gaggcgctaa gcatcatccg gaggataaag atgatgggca acgaatgcat | |
| | 1741 | cctcgttcgt cctttcaggc ttttcttgaa gttgttaaga gccggagtca gccatgggaa | |
| | 1801 | actgcggaaa tggatgcgat tcactcgctc cagcttattc tgagagactc ttttaaagaa | |
| | 1861 | tctgaggcgg ctatgaactc taaagttgtg gatggtgtgg ttcagccatg tagggatatg | |
| | 1921 | gcgggggaac aggggattga tgagttaggt gcagttgcaa gagagatggt taggctcatt | |
| | 1981 | gagactgcaa ctgttcctat attcgctgtg gatgccggag gctgcatcaa tggatggaac | |
| | 2041 | gctaagattg cagagttgac aggtctctca gttgaagaag ctatggggaa gtctctggtt | |
| | 2101 | tctgatttaa tatacaaaga gaatgaagca actgtcaata agcttctttc tcgtgctttg | |
| | 2161 | agaggggacg aggaaaagaa tgtggaggtt aagctgaaaa ctttcagccc cgaactacaa | |
| | 2221 | gggaaagcag tttttgtggt tgtgaatgct tgttccagca aggactactt gaacaacatt | |
| | 2281 | gtcggcgttt gttttgttgg acaagacgtt actagtcaga aaatcgtaat ggataagttc | |
| | 2341 | atcaacatac aaggagatta caaggctatt gtacatagcc caaaccctct aatcccgcca | |
| | 2401 | atttttgctg ctgacgagaa cacgtgctgc ctggaatgga acatggcgat ggaaaagctt | |
| | 2461 | acgggttggt ctcgcagtga agtgattggg aaaatgattg tcggggaagt gtttgggagc | |
| | 2521 | tgttgcatgc taaagggtcc tgatgcttta accaagttca tgattgtatt gcataatgcg | |
| | 2581 | attggtggcc aagatacgga taagttccct ttcccattct ttgaccgcaa tgggaagttt | |
| | 2641 | gttcaggctc tattgactgc aaacaagcgg gttagcctcg agggaaaggt tattggggct | |
| | 2701 | ttctgtttct tgcaaatccc gagccctgag ctgcagcaag ctttagcagt ccaacggagg | |
| | 2761 | caggacacag agtgtttcac gaaggcaaaa gagttggctt atatttgtca ggtgataaag | |
| | 2821 | aatcctttga gcggtatgcg tttcgcaaac tcattgttgg aggccacaga cttgaacgag | |
| | 2881 | gaccagaagc agttacttga aacaagtgtt tcttgcgaga aacagatctc aaggatcgtc | |
| | 2941 | ggggacatgg atcttgaaag cattgaagac ggttcatttg tgctaaagag ggaagagttt | |
| | 3001 | ttccttggaa gtgtcataaa cgcgattgta agtcaagcga tgttcttatt aagggacaga | |
| | 3061 | ggtcttcagc tgatccgtga cattcccgaa gagatcaaat caatagaggt ttttggagac | |
| | 3121 | cagataagga ttcaacagct cctggctgag tttctgctga gtataatccg gtatgcacca | |
| | 3181 | tctcaagagt gggtggagat ccatttaagc caactttcaa agcaaatggc tgatggattc | |
| | 3241 | gccgccatcc gcacagaatt cagaatggcg tgtccaggtg aaggtctgcc tccagagcta | |
| | 3301 | gtccgagaca tgttccatag cagcaggtgg acaagccctg aaggtttagg tctaagcgta | |
| | 3361 | tgtcgaaaga ttttaaagct aatgaacggt gaggttcaat acatccgaga atcagaacgg | |
| | 3421 | tcctatttcc tcatcattct ggaactccct gtacctcgaa agcgaccatt gtcaactgct | |
| | 3481 | agtggaagtg gtgacatgat gctgatgatg ccatattag | |
| 10 | MVSGVGGSGGGRGGGRGGEEEPSSSHTPNNRRGGEQAQSSGTKSLRPRSNTESMSKAIQQYTVDARLHAVE | | A.t. phyB |
| | EQSGESGKSFDYSQSLKTTTYGSSVPEQQITAYLSRIQRGGYIQPFGCMIAVDESSFRIIGYSENAREMLG | | protein |
| | IMPQSVPTLEKPEILAMGTDVRSLFTSSSSILLERAFVAREITLLNPVWIHSKNTGKPFYAILHRIDVGVV | | fragment |
| | IDLEPARTEDPALSIAGAVQSQKLAVRAISQLQALPGGDIKLLCDTVVESVRDLTGYDRVMVYKFHEDEHG | | encoded by the |
| | EVVAESKRDDLEPYIGLHYPATDIPQASRFLFKQNRVRMIVDCNATPVLVVQDDRLTQSMCLVGSTLRAPH | | phyB-9 loss-of- |
| | GCHSQYMANMGSIASLAMAVIINGNEDDGSNVASGRSSMRL- | | function allele |
| | | | of phyB (SEQ ID |
| | | | NO: 9). |
| 11 | 1 | ATGGTTTCCG GAGTCGGGGG TAGTGGCGGT GGCCGTGGCG GTGGCCGTGG CGGAGAAGAA | A. thaliana |
| | 61 | GAACCGTCGT CAAGTCACAC TCCTAATAAC CGAAGAGGAG GAGAACAAGC TCAATCGTCG | phyB Y303V cDNA |
| | 121 | GGAACGAAAT CTCTCAGACC AAGAAGCAAC ACTGAATCAA TGAGCAAAGC AATTCAACAG | (a different |
| | 181 | TACACCGTCG ACGCAAGACT CCACGCCGTT TTCGAACAAT CCGGCGAATC AGGGAAATCA | version of YHB) |
| | 241 | TTCGACTACT CACAATCACT CAAAACGACG ACGTACGGTT CCTCTGTACC TGAGCAACAG | |
| | 301 | ATCACAGCTT ATCTCTCTCG AATCCAGCGA GGTGGTTACA TTCAGCCTTT CGGATGTATG | |
| | 361 | ATCGCCGTCG ATGAATCCAG TTTCCGGATC ATCGGTTACA GTGAAAACGC CAGAGAAATG | |
| | 421 | TTAGGGATTA TGCCTCAATC TGTTCCTACT CTTGAGAAAC CTGAGATTCT AGCTATGGGA | |
| | 481 | ACTGATGTGA GATCTTTGTT CACTTCTTCG AGCTCGATTC TACTCGAGCG TGCTTTCGTT | |
| | 541 | GCTCGAGAGA TTACCTTGTT AAATCCGGTT TGGATCCATT CCAAGAATAC TGGTAAACCG | |
| | 601 | TTTTACGCCA TTCTTCATAG GATTGATGTT GGTGTTGTTA TTGATTTAGA GCCAGCTAGA | |
| | 661 | ACTGAAGATC CTGCGCTTTC TATTGCTGGT GCTGTTCAAT CGCAGAAACT CGCGGTTCGT | |
| | 721 | GCGATTTCTC AGTTACAGGC TCTTCCTGGT GGAGATATTA AGCTTTTGTG TGACACTGTC | |
| | 781 | GTGGAAAGTG TGAGGGACTT GACTGGTTAT GATCGTGTTA TGGTTTATAA GTTTCATGAA | |
| | 841 | GATGAGCATG GAGAAGTIGT AGCTGAGAGT AAACGAGATG ATTTAGAGCC TTATATTGGA | |
| | 901 | CTGCATGTTC CTGCTACTGA TATTCCTCAA GCGTCAAGGT TCTTGTTTAA GCAGAACCGT | |
| | 961 | GTCCGAATGA TAGTAGATTG CAATGCCACA CCTGTTCTTG TGGTCCAGGA CGATAGGCTA | |
| | 1021 | ACTCAGTCTA TGTGCTTGGT TGGTTCTACT CTTAGGGCTC CTCATGGTTG TCACTCTCAG | |
| | 1081 | TATATGGCTA ACATGGGATC TATTGCGTCT TTAGCAATGG CGGTTATAAT CAATGGAAAT | |
| | 1141 | GAAGATGATG GGAGCAATGT AGCTAGTGGA AGAAGCTCGA TGAGGCTTTG GGGTTTGGTT | |
| | 1201 | GTTTGCCATC ACACTTCTTC TCGCTGCATA CCGTTTCCGC TAAGGTATGC TTGTGAGTTT | |
| | 1261 | TTGATGCAGG CTTTCGGTTT ACAGTTAAAC ATGGAATTGC AGTTAGCTTT GCAAATGTCA | |
| | 1321 | GAGAAACGCG TTTTGAGAAC GCAGACACTG TTATGTGATA TGCTTCTGCG TGACTCGCCT | |
| | 1381 | GCTGGAATTG TTACACAGAG TCCCAGTATC ATGGACTTAG TGAAATGTGA CGGTGCAGCA | |
| | 1441 | TTTCTTTACC ACGGGAAGTA TTACCCGTTG GGTGTTGCTC CTAGTGAAGT TCAGATAAAA | |
| | 1501 | GATGTTGTGG AGTGGTTGCT TGCGAATCAT GCGGATTCAA CCGGATTAAG CACTGATAGT | |
| | 1561 | TTAGGCGATG CGGGGTATCC CGGTGCAGCT GCGTTAGGGG ATGCTGTGTG CGGTATGGCA | |
| | 1621 | GTTGCATATA TCACAAAAAG AGACTTTCTT TTTTGGTTTC GATCTCACAC TGCGAAAGAA | |
| | 1681 | ATCAAATGGG GAGGCGCTAA GCATCATCCG GAGGATAAAG ATGATGGGCA ACGAATGCAT | |
| | 1741 | CCTCGTTCGT CCTTTCAGGC TTTTCTTGAA GTTGTTAAGA GCCGGAGTCA GCCATGGGAA | |
| | 1801 | ACTGCGGAAA TGGATGCGAT TCACTCGCTC CAGCTTATTC TGAGAGACTC TTTTAAAGAA | |
| | 1861 | TCTGAGGCGG CTATGAACTC TAAAGTTGTG GATGGTGTGG TTCAGCCATG TAGGGATATG | |
| | 1921 | GCGGGGGAAC AGGGGATTGA TGAGTTAGGT GCAGTTGCAA GAGAGATGGT TAGGCTCATT | |
| | 1981 | GAGACTGCAA CTGTTCCTAT ATTCGCTGTG GATGCCGGAG GCTGCATCAA TGGATGGAAC | |
| | 2041 | GCTAAGATTG CAGAGTTGAC AGGTCTCTCA GTTGAAGAAG CTATGGGGAA GTCTCTGGTT | |
| | 2101 | TCTGATTTAA TATACAAAGA GAATGAAGCA ACTGTCAATA AGCTTCTTTC TCGTGCTTTG | |
| | 2161 | AGAGGGGACG AGGAAAAGAA TGTGGAGGTT AAGCTGAAAA CTTTCAGCCC CGAACTACAA | |
| | 2221 | GGGAAAGCAG TTTTTGTGGT TGTGAATGCT TGTTCCAGCA AGGACTACTT GAACAACATT | |
| | 2281 | GTCGGCGTTT GTTTTGTTGG ACAAGACGTT ACTAGTCAGA AAATCGTAAT GGATAAGTTC | |
| | 2341 | ATCAACATAC AAGGAGATTA CAAGGCTATT GTACATAGCC CAAACCCTCT AATCCCGCCA | |
| | 2401 | ATTTTTGCTG CTGACGAGAA CACGTGCTGC CTGGAATGGA ACATGGCGAT GGAAAAGCTT | |
| | 2461 | ACGGGTTGGT CTCGCAGTGA AGTGATTGGG AAAATGATTG TCGGGGAAGT GTTTGGGAGC | |
| | 2521 | TGTTGCATGC TAAAGGGTCC TGATGCTTTA ACCAAGTTCA TGATTGTATT GCATAATGCG | |
| | 2581 | ATTGGTGGCC AAGATACGGA TAAGTTCCCT TTCCCATTCT TTGACCGCAA TGGGAAGTTT | |
| | 2641 | GTTCAGGCTC TATTGACTGC AAACAAGCGG GTTAGCCTCG AGGGAAAGGT TATTGGGGCT | |
| | 2701 | TTCTGTTTCT TGCAAATCCC GAGCCCTGAG CTGCAGCAAG CTTTAGCAGT CCAACGGAGG | |
| | 2761 | CAGGACACAG AGTGTTTCAC GAAGGCAAAA GAGTTGGCTT ATATTTGTCA GGTGATAAAG | |
| | 2821 | AATCCTTTGA GCGGTATGCG TTTCGCAAAC TCATTGTTGG AGGCCACAGA CTTGAACGAG | |
| | 2881 | GACCAGAAGC AGTTACTTGA AACAAGTGTT TCTTGCGAGA AACAGATCTC AAGGATCGTC | |
| | 2941 | GGGGACATGG ATCTTGAAAG CATTGAAGAC GGTTCATTTG TGCTAAAGAG GGAAGAGTTT | |
| | 3001 | TTCCTTGGAA GTGTCATAAA CGCGATTGTA AGTCAAGCGA TGTTCTTATT AAGGGACAGA | |
| | 3061 | GGTCTTCAGC TGATCCGTGA CATTCCCGAA GAGATCAAAT CAATAGAGGT TTTTGGAGAC | |
| | 3121 | CAGATAAGGA TTCAACAGCT CCTGGCTGAG TTTCTGCTGA GTATAATCCG GTATGCACCA | |
| | 3181 | TCTCAAGAGT GGGTGGAGAT CCATTTAAGC CAACTTTCAA AGCAAATGGC TGATGGATTC | |
| | 3241 | GCCGCCATCC GCACAGAATT CAGAATGGCG TGTCCAGGTG AAGGTCTGCC TCCAGAGCTA | |
| | 3301 | GTCCGAGACA TGTTCCATAG CAGCAGGTGG ACAAGCCCTG AAGGTTTAGG TCTAAGCGTA | |
| | 3361 | TGTCGAAAGA TTTTAAAGCT AATGAACGGT GAGGTTCAAT ACATCCGAGA ATCAGAACGG | |
| | 3421 | TCCTATTTCC TCATCATTCT GGAACTCCCT GTACCTCGAA AGCGACCATT GTCAACTGCT | |
| | 3481 | AGTGGAAGTG GTGACATGAT GCTGATGATG CCATATTAG | |
| 12 | MVSGVGGSGGGRGGGRGGEEEPSSSHTPNNRRGGEQAQSSGTKSLRPRSNTESMSKAIQQYTVDARLHAVE | | Another A.t. |
| | EQSGESGKSFDYSQSLKTTTYGSSVPEQQITAYLSRIQRGGYIQPFGCMIAVDESSFRIIGYSENAREMLG | | YHB allele |
| | IMPQSVPTLEKPEILAMGTDVRSLFTSSSSILLERAFVAREITLLNPVWIHSKNTGKPFYAILHRIDVGVV | | (phyB Y303V) |
| | IDLEPARTEDPALSIAGAVQSQKLAVRAISQLQALPGGDIKLLCDTVVESVRDLTGYDRVMVYKFHEDEHG | | protein |
| | EVVAESKRDDLEPYIGLHVPATDIPOASRFLFKONRVRMIVDCNATPVLVVODDRLTOSMCLVGSTLRAPH | | (encoded by SEQ |
| | GCHSQYMANMGSIASLAMAVIINGNEDDGSNVASGRSSMRLWGLVVCHHTSSRCIPFPLRYACEFLMQAFG | | ID NO: 11) |
| | LOLNMELQLALQMSEKRVLRTQTLLCDMLLRDSPAGIVTQSPSIMDLVKCDGAAFLYHGKYYPLGVAPSEV | | |
| | QIKDVVEWLLANHADSTGLSTDSLGDAGYPGAAALGDAVCGMAVAYITKRDFLFWFRSHTAKEIKWGGAKH | | |
| | HPEDKDDGQRMHPRSSFQAFLEVVKSRSQPWETAEMDAIHSLQLILRDSFKESEAAMNSKVVDGVVQPCRD | | |
| | MAGEQGIDELGAVAREMVRLIETATVPIFAVDAGGCINGWNAKIAELTGLSVEEAMGKSLVSDLIYKENEA | | |
| | TVNKLLSRALRGDEEKNVEVKLKTFSPELQGKAVFVVVNACSSKDYLNNIVGVCFVGQDVTSQKIVMDKFI | | |
| | NIQGDYKAIVHSPNPLIPPIFAADENTCCLEWNMAMEKLTGWSRSEVIGKMIVGEVFGSCCMLKGPDALTK | | |
| | FMIVLHNAIGGODTDKFPFPFFDRNGKFVQALLTANKRVSLEGKVIGAFCFLQIPSPELQQALAVORRODT | | |
| | ECFTKAKELAYICQVIKNPLSGMRFANSLLEATDLNEDQKQLLETSVSCEKQISRIVGDMDLESIEDGSFV | | |
| | LKREEFFLGSVINAIVSQAMFLLRDRGLQLIRDIPEEIKSIEVFGDQIRIQQLLAEFLLSIIRYAPSQEWV | | |
| | EIHLSQLSKQMADGFAAIRTEFRMACPGEGLPPELVRDMFHSSRWTSPEGLGLSVCRKILKLMNGEVQYIR | | |
| | ESERSYFLIILELPVPRKRPLSTASGSGDMMLMMPY- | | |
| 13 | ATGAAGAGGGGAAAAGATGAGGGAAAGATTATGGGGCCTATGTTTCCGAGGCTCCATGTGAATGATACCGA | | A basil elf3 |
| | GAAAGGGGGGCCAAGAGCCCCTCCTAGAAACAAGATGGCTCTTTATGAGCAGCTCAGCATTCCTTCACAGA | | isoform |
| | GACTCAGTAATTCTGTTAGACCCCCGAATTCGGAGCACGCTTCGGATCAGGGGGCTGCAAACGAAAGGGGT | | |
| | GCGTTTTTCTCGTATCAGCTGCCTAACAGACATAAGTCAGATAAGATAAGCAGCCAATATTCCGATTTCAG | | |
| | CGCTCCATTCACGCCACTTGGCCGGAGAAAGAAATCCGATGAAGAGGAATTCAGAGTTCCCGTTTTCCACC | | |
| | ATTCCATCCAAAATCAAGAATGCGGTGATTATGTTAAGAAGGATAACCCCGTGCATGAAAAAGTCTCCGCT | | |
| | TCCAACCCCTCTAGTCTCAATCGTCCGTCGAAATTCCATAAATTCAAAAGCCAGACAGACAAGAATTCAAA | | |
| | AGAGTTCCCCTCTGATCGAACAAAAGTTGTGTCAAATTCATCCATCATCGAGAAGCAAATTGATTCAGCTT | | |
| | TTTGTCGTGAGCCAACAGATTGTCAAGCTAGTAGTATTGGCAGATTACAGACCCGCGATATGAGTGAGCCA | | |
| | GAGCTACGTGCTGATTCTGAGCATGATGAAATTAGGCGTGCTAACTCTGTGGTAATGAAGAATTTTCCAAC | | |
| | CTTAGATGAAAGAAATTCTAAAGAATTGGGAAATGATGAAGGATCTCAGAAAAGATTGGTACCAATGGGAG | | |
| | ACCTTGAGAGGGCTGACAGTGTGTCTGAGATTTCGGTTGTCGAGTCCATTGCTGGGCTCGATATGACACCC | | |
| | GACGACGTGGTGGGAATAATTGGTCAGAAACATTTTTGGAAGGCCAGAAAGAATATTCTTAATCAACAAAG | | |
| | AGTTTTTGCTGTTCAAGTATTCGAGTTGCATCGATTGGTTAAGGTCCAGAGATTGATCGCTGCATTGCCAC | | |
| | AGTTCTTGCTCGACAACACGGCCTTCGTCGACAAACCAAACGCTGCGCCCGGACCAAAAGTCCCATCGGTT | | |
| | AGTCCCCTCAAAGCCGCGAATCCCGAAATTCCAAAGCGAAAAGGCGAACTCCAGAAGCCGAGCCATAACAA | | |
| | GGAAAGCTCCGCCGAAAACACTGCCGAGAAACCATCGTTCTCGTCCATTCAAAACGGCGAGCTCCCGTCTG | | |
| | GCTACGGGCCGTTGACAGGCAACTCTCTGGGCCCTCCCGTTTCGAGCAATCCAAATACCGGGCCCGGGCCG | | |
| | TGGTGCTTCAACCAACCTCAAGGGCACCAATGGTTGATTCCTGTGATGACACCTTCAGAAGGACTAGTTTA | | |
| | CAAGCCATATCCCGGGCCGGGCTTCGTGGGCCCAGCCTGCGGCGGCTGTGGCCCACCCGCGCCAATTCCAG | | |
| | CGTATGGAATCCCGGCCCCACATCCTCATTATCAGCTCCCATCGTTCCCGCACGGCTACTTCCCGACGTAC | | |
| | GGCATGCCGATGATGAACACGGCCGCAGTGTCGGGCTCGTCCGTCGAGCAGACGAACCCTCAACCTGTTCC | | |
| | TAGCCAAGCTTCGGGAGGCGGAACCGGTGCCAGCTTTCAACATCATCAGAACTTGCCTTCGACACCAAGCC | | |
| | GCAAGAATCGAGCAGATCCTGACAGGACGAATGCGTCGAAGAACTACGAACTTGTTGAGACTAGCAGAGGA | | |
| | AGTAGCCCCGTTGAAAGATTGGTCGATAATGGAGGAGGAAGCGATGACGGGGAAAGAGGGAATATGCTCTC | | |
| | ACTTTTCCCAATGGCCCCATCTTCCGATGAGCCTGGTTCGAGCCCAGCCTGTACGAAGCCCGATCGGCCGA | | |
| | CTCAAGTGGTCAGGGTTGTGCCTCATAATGCAAGATCTGCCACTGAATCTGCTGCAAGGATTTTTAGATTT | | |
| | ATACAAGAAGGAAGAAAACAGTATGATTCTGTGTGA | | |
| 14 | ATGAAGAGAGGGAGAGATGAGGGGAAGATTATGGGGCCAATGTTTCCAAGGCTACATGTGAATGACACTGA | | |
| | GAAAGGAGGGCCAAGAGCCCCTCCCAGAAACAAAATGGCTCTGTATGAGCAGCTCACCATCCCTTCCCACA | | |
| | GACTCACCGATTCCGCCCAGGGTGTTTCAACTGATACTGGTGCAATTTTCCCATACAAGCCGTCTAACAGA | | |
| | CATCAGTCCGAGAATCTATGCGGTCAATATTCCGATTTCAGTATACCGTCGACGCCAGTCAGCTGGAGAAA | | |
| | GAAATCGGACGAAGAGGATTTCAGAGTTCCCATTTTCAACGATTCTGTCCGAAGTCAAGAACGTAGAAAAT | | |
| | GTGGTAATGACCCGGTGCAGGAAAAGGTCAATCACCCGTCGAAATTCCATAAATTCAAAAGGACAGGCATG | | |
| | CTTGAAAGTAACATGAGGCAAGAAGGCAAAAGCCAGACAGAAAAGAATTCACAAGCGCTTGCATTCGATCG | | |
| | AGCAAAAGCTTTATCAAACTCATCTAGCATCGAGAAGCAGAATGGTTCACCTATATTTCGTGAACGGAGAG | | |
| | ATTGTCCTGCTAAAAGTGTCGACAGATTACAGACCCGCGATGCCATTGAGCCGAAGCTCCGTCCTGATTCA | | |
| | GAGCGTGCTGGAAACGGGTGCACTACCTCGCTGTTGGAGAAGGCTTCGGCAACCTTAGATGAAAGAAACTC | | |
| | TTCTGCTCCATTCAGAGATCAGAGAAATTCTTGTGATTTGGGAAACAATCGCAAAAGGTCAGTGGCGGTGA | | |
| | CAAATCTTGATATGGCTGACAGTGTGTCGGAGATCTCGCTTGTGGAGTCCATCGCCGGACCGGATATGACG | | |
| | CCTGATGACGTGGTGGGAATAATCGGTCCGAAACATTTTTGGAAAGCCAGAAAAGCCATTCTCAACCAACA | | |
| | AAGAGTTTTCGCGATCCAAGTATTCGAGTTGCATCGACTGATAAAGGTCCAGAGATCGATCGCCGAATCAC | | |
| | CCCAGATGTTGGCCGACAACTCGGTTTTCGTCGACAAACCAGACTTGGCTAGTCCCGTCAAACCTATTCCC | | |
| | AATGCTTCCAAGCGTACGGCCAGCCCCATCAAAGCATTTCCCGCCGTTTCCAAGAAAAAACCCGAACCCAA | | |
| | AAAGGCGAGTCAGAACAAGGAAAGCCCCGTCGAAAAGGCCTCTTTTTCGACGGGCCATGGCGGGCCGTGGT | | |
| | GCTTCAACCAGCCTCAAGGCCACCAATGGCTGATTCCTGTGATGACTCCTTCGGAGGGACTCGTGTATAAG | | |
| | CCATATCCCGGGCCGGGCTTCGTTGGCCCGAATCCGACAATGGGCAGTTTCTTGCCTCCTCCGGGATATGG | | |
| | AATCCCACCACACTATCAGGGCTGCTACTTTTCGCCGTATGCAATGTCGGCGGCTGCAGTGTCGGGCTCGT | | |
| | CTGTCGAGCAGACGAACCCTCCCCAATCAAGCAGAGCAAGTAGCCCTGTTGAGAGATTGGTGGATAGTGGA | | |
| | GGAAGCAATGATATGGAAAGAGGGAATGTGCTGCCACTTTTCCCCGTGGCGCCCGACTCAAGCCCGGCCCG | | |
| | GTCCAAGCCCGAGTCCGAGCCCGATCGCCCTGCTCGGGTGATAAGAGTTGTGCCTCATAATGCAACTTCAG | | |
| | CAACTGAATCTGCTGCAAGAATTTTCAGGTCTATTCAAGAGGAAAGAAGACGGTATGATTCTGTGTAA | | |
| 15 | ATGAAGAGAGGGAGAGATGAGGGGAAGATTATGGGGCCAATGTTTCCAAGGCTACATGTGAATGACACTGA | | |
| | GAAAGGAGGGCCAAGAGCCCCTCCCAGAAACAAAATGGCTCTGTATGAGCAGCTCACCATCCCTTCCCACA | | |
| | GACTCACCGATTCCGCCCAGACATCAGTCCGAGAATCTATGCGGTCAATATTCCGATTTCAGTATACCGTC | | |
| | GACGCCAGTCAGCTGGAGAAAGAAATCGGACGAAGAGGATTTCAGAGTTCCCATTTTCAACGATTCTGTCC | | |
| | GAAGTCAAGAACGTAG | | |
| 16 | ATGAAGAGAAATAATGAAGGGGAGAAGATAATGGGGGCCATGTTTCCTAGGCTTCATGTGAACGACACCGA | | |
| | AAAGGGGGGGCCACGAGCACCCCCGAGAAACAAGATGGCTTTATACGAGCAGCTTAGCATACCTTCACACA | | |
| | GACTGAATCATGCTGTGATGCCCCGAAACCCGACTAACAACGCCACTAGCACGGCCCCTTCATCGAGAATG | | |
| | GGCGGTGGAAATCATCGGGGTTCGTTCAGTGCTTGTGTACGGCGTCGTGCATATCCATCTCAGGATCAATA | | |
| | TACCCAATATTCAGAATCGAGCACTTCACCACCACCACAAGTAGAGCCAAGAAAGAAAATCTACGACAATG | | |
| | ACAATAGGGTTCCTATTTTCATCCAGCCCATACCTCAAGAATTTGATAAATACAGCAGTGGCTTTCTCTCC | | |
| | AATCCTCCATATTTGGACCCTCCATTGAAATTTCATCAGACCAATGAAATGAGCACGCTTGAAGTTAGTAT | | |
| | TGGAGATGAGGGGCAAATCAAGAAGAGAGAAAATTCAAATGCAGTGAGCTCGGAGAAGGATGATACTGCCT | | |
| | CTGAAACTTCGATTTTGGATACGGAATCAGCCCTCGAAATAACGCCCGATGATGTTGTGGGTGCAATGGGG | | |
| | CAAGAACATTTTTGGAAAGCCAGAAGAGCAATCATGAATCAGCAAAGAGTGTTTGCAGTTCAAGTATTCGA | | |
| | GTTGCATAGATTGATAAAGGTCCAGAGATCGATCGCTGCATCGCCACATCTTTTGCACGACGAAGCTGCTT | | |
| | ATCTCGACGACCCCACAAAACCATTACCGGCAAAGAAACGGCCGCTCGATTGCACTGATAATGCGGTCTTG | | |
| | AACGCTGAGAACCCGAGACACAAGAAGGAGCGGTCCGCCAAAAACACGGTCGAGAAAGAGAAAACGCCTCT | | |
| | TTCTTCAGCTCGTCCGGCTTCGACCGTCGTGAGCACTGATTGGAGCAACGCTCGAACATCATATTTCAATG | | |
| | ATCCCCTGCCACACGGACACCAATGGTTGATTCCTATAATGTCTCCTTCAGAAGGATTAGTATACAAGCCG | | |
| | TGTTCGGGCCCCGGATTTCTCGGCCCGATAGGGTTGAATCCGACAACGATCGGAAACTTCGTAGCTCCCGT | | |
| | ATACGGCCTCCCGCCACCGTCGCATCCGTTCCCACCTTTTTACGGGCCTCATTACAGCATGCCGGTTATGA | | |
| | GCTCTGCAGCCTTCTCGGCCCGTGAATCCACGTTGGATCGGCCTGCCTTGAAAGCCGGACCGTGCCAACGT | | |
| | GCCACGGAGGAGATCAAAAGTGGCCATAGTAGGGTTAGCAACGGCATTCTTCAACGTTTCCCGATATCGTC | | |
| | TCCGGCCACCACCGATGCCTCGGAATCGAGCTGTCGCGTTCGTGCGGCGGGGCCCGGCCCGGCCCGAGGGT | | |
| | GAT | | |
| 17 | ATGAAGAGAGGGAATGATGGGGAGAAGATAATGGGCCCTATGTTCCCTAGGCTTCATGTAAATGATGCTGA | | |
| | TAAGGGCGGGCCCAGAGCTCCTCCAAGGAATAAGATGGCCTTGTATGAGCAGCTCAGCATTCCTTCTCAGA | | |
| | GATTCAGTCATGCCGTGCCGCCCCATAATAGGAATAATAACATGGCCACTTCAGTGCCCAAGTCGAGCCTG | | |
| | AGCGGTGGGAACGATAGGGGCGCGTTCAGTGCTCGGCAGGTGCATCGAGCATATCCATATGAGATTGAGAA | | |
| | GCAATACAGGGACTGCTCGGAATTGAGTGCTCCGCTGGCACAAGTAAAGCAAAGAAAGAAAATCGACGAAG | | |
| | ATGACTATGCAGTTCCTGTTTTCATCCAGCCTAAACCTTCAGAATTCGAAAACTACAGCAAGGAAAAACTC | | |
| | TCACCCTCCAATCCTCCTTATTTGCACCCTTCGTTGAAATCTCAGCTCTCCAACGAAATAGACACGCTCGA | | |
| | AATTAGTATCGGACGAGAAGGGGGAAGCAAGAAGAGAGAAAATTCAGACGAGTACGTGACTGGGAGTAAAG | | |
| | AAACTGTTTCCTCAATTAGTCATGAATTTGGAGCAAATCTCGTCAACAGCGTCGACATATTAAGGAATGAT | | |
| | GACATGGCTGCGGAAAAAAGAAATCCATCTAATTTAGGGGAAGTTCTACAATCGGAGGATCAGAATACAGT | | |
| | CCATGATCTTAGTTATGAGACGGGGTCTGATGAAGATGGGTCTTTGCAAGAAGGGAAATTGGAAAGGCGAG | | |
| | ATAGTGCCTCGGAAACATCCGTTTTGGATACGGAATCTGCCATGGAAATAACGCCCGACGACGTTGTGGGT | | |
| | ACGATAGGCCAGAAGCATTTTTGGAAAGCCAGAAGAGCTATCATGAAAATATTAATTCCTCATAGTGAGGA | | |
| | AATTTATTTCTTCAGCCACCTTTGAT | | |
| 18 | ATGAAGAGAGGGAATGATGGGGAGAAGATAATGGGCCCTATGTTCCCTAGGCTTCATGTAAATGATGCTGA | | |
| | TAAGGGCGGGCCCAGAGCTCCTCCAAGGAATAAGATGGCCTTGTATGAGCAGCTCAGCATTCCTTCTCAGA | | |
| | GATTCAGTCATGCCGTGCCGCCCCATAATAGGAATAATAACATGGCCACTTCAGTGCCCAAGTCGAGCCTG | | |
| | AGCGGTGGGAACGATAGGGGCGCGTTCAGTGCTCGGCAGGTGCATCGAGCATATCCATATGAGATTGAGAA | | |
| | GCAATACAGGGACTGCTCGGAATTGAGTGCTCCGCTGGCACAAGTAAAGCAAAGAAAGAAAATCGACGAAG | | |
| | ATGACTATGCAGTTCCTGTTTTCATCCAGCCTAAACCTTCAGAATTCGAAAACTACAGCAAGGAAAAACTC | | |
| | TCACCCTCCAATCCTCCTTATTTGCACCCTTCGTTGAAATCTCAGCTCTCCAACGAAATAGACACGCTCGA | | |
| | AATTAGTATCGGACGAGAAGGGGGAAGCAAGAAGAGAGAAAATTCAGACGAGTACGTGACTGGGAGTAAAG | | |
| | AAACTGTTTCCTCAATTAGTCATGAATTTGGAGCAAATCTCGTCAACAGCGTCGACATATTAAGGAATGAT | | |
| | GACATGGCTGCGGAAAAAAGAAATCCATCTAATTTAGGGGAAGTTCTACAATCGGAGGATCAGAATACAGT | | |
| | CCATGATCTTAGTTATGAGACGGGGTCTGATGAAGATGGGTCTTTGCAAGAAGGGAAATTGGAAAGGCGAG | | |
| | ATAGTGCCTCGGAAACATCCGTTTTGGATACGGAATCTGCCATGGAAATAACGCCCGACGACGTTGTGGGT | | |
| | ACGATAGGCCAGAAGCATTTTTGGAAAGCCAGAAGAGCTATCATGAAGTAA | | |
| 19 | 1 | ggccctctag aggatccccg ggtaccctcg aattatcata catgagaatt aagggagtca | pK7-35S::YHB- |
| | 61 | cgttatgacc cccgccgatg acgcgggaca agccgtttta cgtttggaac tgacagaacc | mCer-SHH. |
| | 121 | gcaacgttga aggagccact cagccgcggg tttctggagt ttaatgagct aagcacatac | Plasmid |
| | 181 | gtcagaaacc attattgcgc gttcaaaagt cgcctaaggt cactatcagc tagcaaatat | comprising |
| | 241 | ttcttgtcaa aaatgctcca ctgacgttcc ataaattccc ctcggtatcc aattagagtc | expression |
| | 301 | tcatattcac tctcaactcg atcgaggcat gattgaacaa gatggattgc acgcaggttc | construct for |
| | 361 | tccggccgct tgggtggaga ggctattcgg ctatgactgg gcacaacaga caatcggctg | A.t. YHB which |
| | 421 | ctctgatgcc gccgtgttcc ggctgtcagc gcaggggcgc ccggttcttt ttgtcaagac | has a sequence |
| | 481 | cgacctgtcc ggtgccctga atgaactcca agacgaggca gcgcggctat cgtggctggc | of SEQ ID NO: |
| | 541 | cacgacgggc gttccttgcg cagctgtgct cgacgttgtc actgaagcgg gaagggactg | 24 |
| | 601 | gctgctattg ggcgaagtgc cggggcagga tctcctgtca tctcaccttg ctcctgccga | |
| | 661 | gaaagtatcc atcatggctg atgcaatgcg gcggctgcat acgcttgatc cggctacctg | |
| | 721 | cccattcgac caccaagcga aacatcgcat cgagcgagca cgtactcgga tggaagccgg | |
| | 781 | tcttgtcgat caggatgatc tggacgaaga gcatcagggg ctcgcgccag ccgaactgtt | |
| | 841 | cgccaggctc aaggcgcgga tgcccgacgg cgaggatctc gtcgtgaccc acggcgatgc | |
| | 901 | ctgcttgccg aatatcatgg tggaaaatgg ccgcttttct ggattcatcg actgtggccg | |
| | 961 | gctgggtgtg gcggaccgct atcaggacat agcgttggct acccgtgata ttgctgaaga | |
| | 1021 | gcttggcggc gaatgggctg accgcttcct cgtgctttac ggtatcgccg ctcccgattc | |
| | 1081 | gcagcgcatc gccttctatc gccttcttga cgagttcttc tgagcgggac tctggggttc | |
| | 1141 | ggactctagc tagagtcaag cagatcgttc aaacatttgg caataaagtt tcttaagatt | |
| | 1201 | gaatcctgtt gccggtcttg cgatgattat catataattt ctgttgaatt acgttaagca | |
| | 1261 | tgtaataatt aacatgtaat gcatgacgtt atttatgaga tgggttttta tgattagagt | |
| | 1321 | cccgcaatta tacatttaat acgcgataga aaacaaaata tagcgcgcaa actaggataa | |
| | 1381 | attatcgcgc gcggtgtcat ctatgttact agatcgaccg gcatgcaagc tgataattca | |
| | 1441 | attcggcgtt aattcagtac attaaaaacg tccgcaatgt gttattaagt tgtctaagcg | |
| | 1501 | tcaatttgtt tacaccacaa tatatcctgc caccagccag ccaacagctc cccgaccggc | |
| | 1561 | agctcggcac aaaatcacca ctcgatacag gcagcccatc agtccgggac ggcgtcagcg | |
| | 1621 | ggagagccgt tgtaaggcgg cagactttgc tcatgttacc gatgctattc ggaagaacgg | |
| | 1681 | caactaagct gccgggtttg aaacacggat gatctcgcgg agggtagcat gttgattgta | |
| | 1741 | acgatgacag agcgttgctg cctgtgatca attcgggcac gaacccagtg gacataagcc | |
| | 1801 | tcgttcggtt cgtaagctgt aatgcaagta gcgtaactgc cgtcacgcaa ctggtccaga | |
| | 1861 | accttgaccg aacgcagcgg tggtaacggc gcagtggcgg ttttcatggc ttcttgttat | |
| | 1921 | gacatgtttt tttggggtac agtctatgcc tcgggcatcc aagcagcaag cgcgttacgc | |
| | 1981 | cgtgggtcga tgtttgatgt tatggagcag caacgatgtt acgcagcagg gcagtcgccc | |
| | 2041 | taaaacaaag ttaaacatca tgggggaagc ggtgatcgcc gaagtatcga ctcaactatc | |
| | 2101 | agaggtagtt ggcgtcatcg agcgccatct cgaaccgacg ttgctggccg tacatttgta | |
| | 2161 | cggctccgca gtggatggcg gcctgaagcc acacagtgat attgatttgc tggttacggt | |
| | 2221 | gaccgtaagg cttgatgaaa caacgcggcg agctttgatc aacgaccttt tggaaacttc | |
| | 2281 | ggcttcccct ggagagagcg agattctccg cgctgtagaa gtcaccattg ttgtgcacga | |
| | 2341 | cgacatcatt ccgtggcgtt atccagctaa gcgcgaactg caatttggag aatggcagcg | |
| | 2401 | caatgacatt cttgcaggta tcttcgagcc agccacgatc gacattgatc tggctatctt | |
| | 2461 | gctgacaaaa gcaagagaac atagcgttgc cttggtaggt ccagcggcgg aggaactctt | |
| | 2521 | tgatccggtt cctgaacagg atctatttga ggcgctaaat gaaaccttaa cgctatggaa | |
| | 2581 | ctcgccgccc gactgggctg gcgatgagcg aaatgtagtg cttacgttgt cccgcatttg | |
| | 2641 | gtacagcgca gtaaccggca aaatcgcgcc gaaggatgtc gctgccgact gggcaatgga | |
| | 2701 | gcgcctgccg gcccagtatc agcccgtcat acttgaagct agacaggctt atcttggaca | |
| | 2761 | agaagaagat cgcttggcct cgcgcgcaga tcagttggaa gaatttgtcc actacgtgaa | |
| | 2821 | aggcgagatc accaaggtag tcggcaaata atgtctagct agaaattcgt tcaagccgac | |
| | 2881 | gccgcttcgc cggcgttaac tcaagcgatt agatgcacta agcacataat tgctcacagc | |
| | 2941 | caaactatca ggtcaagtct gcttttatta tttttaagcg tgcataataa gccctacaca | |
| | 3001 | aattgggaga tatatcatgc atgaccaaaa tcccttaacg tgagttttcg ttccactgag | |
| | 3061 | cgtcagaccc cgtagaaaag atcaaaggat cttcttgaga tccttttttt ctgcgcgtaa | |
| | 3121 | tctgctgctt gcaaacaaaa aaaccaccgc taccagcggt ggtttgtttg ccggatcaag | |
| | 3181 | agctaccaac tctttttccg aaggtaactg gcttcagcag agcgcagata ccaaatactg | |
| | 3241 | tccttctagt gtagccgtag ttaggccacc acttcaagaa ctctgtagca ccgcctacat | |
| | 3301 | acctcgctct gctaatcctg ttaccagtgg ctgctgccag tggcgataag tcgtgtctta | |
| | 3361 | ccgggttgga ctcaagacga tagttaccgg ataaggcgca gcggtcgggc tgaacggggg | |
| | 3421 | gttcgtgcac acagcccagc ttggagcgaa cgacctacac cgaactgaga tacctacagc | |
| | 3481 | gtgagctatg agaaagcgcc acgcttcccg aagggagaaa ggcggacagg tatccggtaa | |
| | 3541 | gcggcagggt cggaacagga gagcgcacga gggagcttcc agggggaaac gcctggtatc | |
| | 3601 | tttatagtcc tgtcgggttt cgccacctct gacttgagcg tcgatttttg tgatgctcgt | |
| | 3661 | caggggggcg gagcctatgg aaaaacgcca gcaacgcggc ctttttacgg ttcctggcct | |
| | 3721 | tttgctggcc ttttgctcac atgttctttc ctgcgttatc ccctgattct gtggataacc | |
| | 3781 | gtattaccgc ctttgagtga gctgataccg ctcgccgcag ccgaacgacc gagcgcagcg | |
| | 3841 | agtcagtgag cgaggaagcg gaagagcgcc tgatgcggta ttttctcctt acgcatctgt | |
| | 3901 | gcggtatttc acaccgcata tggtgcactc tcagtacaat ctgctctgat gccgcatagt | |
| | 3961 | taagccagta tacactccgc tatcgctacg tgactgggtc atggctgcgc cccgacaccc | |
| | 4021 | gccaacaccc gctgacgcgc cctgacgggc ttgtctgctc ccggcatccg cttacagaca | |
| | 4081 | agctgtgacc gtctccggga gctgcatgtg tcagaggttt tcaccgtcat caccgaaacg | |
| | 4141 | cgcgaggcag ggtgccttga tgtgggcgcc ggcggtcgag tggcgacggc gcggcttgtc | |
| | 4201 | cgcgccctgg tagattgcct ggccgtaggc cagccatttt tgagcggcca gcggccgcga | |
| | 4261 | taggccgacg cgaagcggcg gggcgtaggg agcgcagcga ccgaagggta ggcgcttttt | |
| | 4321 | gcagctcttc ggctgtgcgc tggccagaca gttatgcaca ggccaggcgg gttttaagag | |
| | 4381 | ttttaataag ttttaaagag ttttaggcgg aaaaatcgcc ttttttctct tttatatcag | |
| | 4441 | tcacttacat gtgtgaccgg ttcccaatgt acggctttgg gttcccaatg tacgggttcc | |
| | 4501 | ggttcccaat gtacggcttt gggttcccaa tgtacgtgct atccacagga aagagacctt | |
| | 4561 | ttcgaccttt ttcccctgct agggcaattt gccctagcat ctgctccgta cattaggaac | |
| | 4621 | cggcggatgc ttcgccctcg atcaggttgc ggtagcgcat gactaggatc gggccagcct | |
| | 4681 | gccccgcctc ctccttcada tcgtactccg gcaggtcatt tgacccgatc agcttgcgca | |
| | 4741 | cggtgaaaca gaacttcttg aactctccgg cgctgccact gcgttcgtag atcgtcttga | |
| | 4801 | acaaccatct ggcttctgcc ttgcctgcgg cgcggcgtgc caggcggtag agaaaacggc | |
| | 4861 | cgatgccggg atcgatcaaa aagtaatcgg ggtgaaccgt cagcacgtcc gggttcttgc | |
| | 4921 | cttctgtgat ctcgcggtac atccaatcag ctagctcgat ctcgatgtac tccggccgcc | |
| | 4981 | cggtttcgct ctttacgatc ttgtagcggc taatcaaggc ttcaccctcg gataccgtca | |
| | 5041 | ccaggcggcc gttcttggcc ttcttcgtac gctgcatggc aacgtgcgtg gtgtttaacc | |
| | 5101 | gaatgcaggt ttctaccagg tcgtctttct gctttccgcc atcggctcgc cggcagaact | |
| | 5161 | tgagtacgtc cgcaacgtgt ggacggaaca cgcggccggg cttgtctccc ttcccttccc | |
| | 5221 | ggtatcggtt catggattcg gttagatggg aaaccgccat cagtaccagg tcgtaatccc | |
| | 5281 | acacactggc catgccggcc ggccctgcgg aaacctctac gtgcccgtct ggaagctcgt | |
| | 5341 | agcggatcac ctcgccagct cgtcggtcac gcttcgacag acggaaaacg gccacgtcca | |
| | 5401 | tgatgctgcg actatcgcgg gtgcccacgt catagagcat cggaacgaaa aaatctggtt | |
| | 5461 | gctcgtcgcc cttgggcggc ttcctaatcg acggcgcacc ggctgccggc ggttgccggg | |
| | 5521 | attctttgcg gattcgatca gcggccgctt gccacgattc accggggcgt gcttctgcct | |
| | 5581 | cgatgcgttg ccgctgggcg gcctgcgcgg ccttcaactt ctccaccagg tcatcaccca | |
| | 5641 | gcgccgcgcc gatttgtacc gggccggatg gtttgcgacc gtcacgccga ttcctcgggc | |
| | 5701 | ttgggggttc cagtgccatt gcagggccgg cagacaaccc agccgcttac gcctggccaa | |
| | 5761 | ccgcccgttc ctccacacat ggggcattcc acggcgtcgg tgcctggttg ttcttgattt | |
| | 5821 | tccatgccgc ctcctttagc cgctaaaatt catctactca tttattcatt tgctcattta | |
| | 5881 | ctctggtagc tgcgcgatgt attcagatag cagctcggta atggtcttgc cttggcgtac | |
| | 5941 | cgcgtacatc ttcagcttgg tgtgatcctc cgccggcaac tgaaagttga cccgcttcat | |
| | 6001 | ggctggcgtg tctgccaggc tggccaacgt tgcagccttg ctgctgcgtg cgctcggacg | |
| | 6061 | gccggcactt agcgtgtttg tgcttttgct cattttctct ttacctcatt aactcaaatg | |
| | 6121 | agttttgatt taatttcagc ggccagcgcc tggacctcgc gggcagcgtc gccctcgggt | |
| | 6181 | tctgattcaa gaacggttgt gccggcggcg gcagtgcctg ggtagctcac gcgctgcgtg | |
| | 6241 | atacgggact caagaatggg cagctcgtac ccggccagcg cctcggcaac ctcaccgccg | |
| | 6301 | atgcgcgtgc ctttgatcgc ccgcgacacg acaaaggccg cttgtagcct tccatccgtg | |
| | 6361 | acctcaatgc gctgcttaac cagctccacc aggtcggcgg tggcccatat gtcgtaaggg | |
| | 6421 | cttggctgca ccggaatcag cacgaagtcg gctgccttga tcgcggacac agccaagtcc | |
| | 6481 | gccgcctggg gcgctccgtc gatcactacg aagtcgcgcc ggccgatggc cttcacgtcg | |
| | 6541 | cggtcaatcg tcgggcggtc gatgccgaca acggttagcg gttgatcttc ccgcacggcc | |
| | 6601 | gcccaatcgc gggcactgcc ctggggatcg gaatcgacta acagaacatc ggccccggcg | |
| | 6661 | agttgcaggg cgcgggctag atgggttgcg atggtcgtct tgcctgaccc gcctttctgg | |
| | 6721 | ttaagtacag cgataacctt catgcgttcc ccttgcgtat ttgtttattt actcatcgca | |
| | 6781 | tcatatacgc agcgaccgca tgacgcaagc tgttttactc aaatacacat caccttttta | |
| | 6841 | gacggcggcg ctcggtttct tcagcggcca agctggccgg ccaggccgcc agcttggcat | |
| | 6901 | cagacaaacc ggccaggatt tcatgcagcc gcacggttga gacgtgcgcg ggcggctcga | |
| | 6961 | acacgtaccc ggccgcgatc atctccgcct cgatctcttc ggtaatgaaa aacggttcgt | |
| | 7021 | cctggccgtc ctggtgcggt ttcatgcttg ttcctcttgg cgttcattct cggcggccgc | |
| | 7081 | cagggcgtcg gcctcggtca atgcgtcctc acggaaggca ccgcgccgcc tggcctcggt | |
| | 7141 | gggcgtcact tcctcgctgc gctcaagtgc gcggtacagg gtcgagcgat gcacgccaag | |
| | 7201 | cagtgcagcc gcctctttca cggtgcggcc ttcctggtcg atcagctcgc gggcgtgcgc | |
| | 7261 | gatctgtgcc ggggtgaggg tagggcgggg gccaaacttc acgcctcggg ccttggcggc | |
| | 7321 | ctcgcgcccg ctccgggtgc ggtcgatgat tagggaacgc tcgaactcgg caatgccggc | |
| | 7381 | gaacacggtc aacaccatgc ggccggccgg cgtggtggtg tcggcccacg gctctgccag | |
| | 7441 | gctacgcagg cccgcgccgg cctcctggat gcgctcggca atgtccagta ggtcgcgggt | |
| | 7501 | gctgcgggcc aggcggtcta gcctggtcac tgtcacaacg tcgccagggc gtaggtggtc | |
| | 7561 | aagcatcctg gccagctccg ggcggtcgcg cctggtgccg gtgatcttct cggaaaacag | |
| | 7621 | cttggtgcag ccggccgcgt gcagttcggc ccgttggttg gtcaagtcct ggtcgtcggt | |
| | 7681 | gctgacgcgg gcatagccca gcaggccagc ggcggcgctc ttgttcatgg cgtaatgtct | |
| | 7741 | ccggttctag tcgcaagtat tctactttat gcgactaaaa cacgcgacaa gaaaacgcca | |
| | 7801 | ggaaaagggc agggcggcag cctgtcgcgt aacttaggac ttgtgcgaca tgtcgttttc | |
| | 7861 | agaagacggc tgcactgaac gtcagaagcc gactgcacta tagcagcgga ggggttggat | |
| | 7921 | caaagtactt tgatcccgag gggaaccctg tggttggcat gcacatacaa atggacgaac | |
| | 7981 | ggataaacct tttcacgccc ttttaaatat ccgttattct aataaacgct cttttctctt | |
| | 8041 | aggtttaccc gccaatatat cctgtcaaac actgatagtt taaactgaag gcgggaaacg | |
| | 8101 | acaatctgat ccaagctcaa gctaagcttg agctctccca tatggtcgac tagagccaag | |
| | 8161 | ctgatctcct ttgccccgga gatcaccatg gacgactttc tctatctcta cgatctagga | |
| | 8221 | agaaagttcg acggagaagg tgacgatacc atgttcacca ccgataatga gaagattagc | |
| | 8281 | ctcttcaatt tcagaaagaa tgctgaccca cagatggtta gagaggccta cgcggcaggt | |
| | 8341 | ctcatcaaga cgatctaccc gagtaataat ctccaggaga tcaaatacct tcccaagaag | |
| | 8401 | gttaaagatg cagtcaaaag attcaggact aactgcatca agaacacaga gaaagatata | |
| | 8461 | tttctcaaga tcagaagtac tattccagta tggacgattc aaggcttgct tcataaacca | |
| | 8521 | aggcaagtaa tagagattgg agtctctaag aaagtagttc ctactgaatc aaaggccatg | |
| | 8581 | gagtcaaaaa ttcagatcga ggatctaaca gaactcgccg tgaagactgg cgaacagttc | |
| | 8641 | atacagagtc ttttacgact caatgacaag aagaaaatct tcgtcaacat ggtggagcac | |
| | 8701 | gacactctcg tctactccaa gaatatcaaa gatacagtct cagaagacca aagggctatt | |
| | 8761 | gagacttttc aacaaagggt aatatcggga aacctcctcg gattccattg cccagctatc | |
| | 8821 | tgtcacttca tcaaaaggac agtagaaaag gaaggtggca cctacaaatg ccatcattgc | |
| | 8881 | gataaaggaa aggctatcgt tcaagatgcc tctgccgaca gtggtcccaa agatggaccc | |
| | 8941 | ccacccacga ggagcatcgt ggaaaaagaa gacgttccaa ccacgtcttc aaagcaagtg | |
| | 9001 | gattgatgtg atatctccac tgacgtaagg gatgacgcac aatcccacta tccttcgcaa | |
| | 9061 | gacccttcct ctatataagg aagttcattt catttggaga ggactccggt atttttacaa | |
| | 9121 | caataccaca acaaaacaaa caacaaacaa cattacaatt tactattcta gtcgacctgc | |
| | 9181 | aggcggccgc actagtgata tcacaagttt gtacaaaaaa gcaggctccg cggccgcccc | |
| | 9241 | cttcaccatg gtttccggag tcgggggtag tggcggtggc cgtggcggtg gccgtggcgg | |
| | 9301 | agaagaagaa ccgtcgtcaa gtcacactcc taataaccga agaggaggag aacaagctca | |
| | 9361 | atcgtcggga acgaaatctc tcagaccaag aagcaacact gaatcaatga gcaaagcaat | |
| | 9421 | tcaacagtac accgtcgacg caagactcca cgccgttttc gaacaatccg gcgaatcagg | |
| | 9481 | gaaatcattc gactactcac aatcactcaa aacgacgacg tacggttcct ctgtacctga | |
| | 9541 | gcaacagatc acagcttatc tctctcgaat ccagcgaggt ggttacattc agcctttcgg | |
| | 9601 | atgtatgatc gccgtcgatg aatccagttt ccggatcatc ggttacagtg aaaacgccag | |
| | 9661 | agaaatgtta gggattatgc ctcaatctgt tcctactctt gagaaacctg agattctagc | |
| | 9721 | tatgggaact gatgtgagat ctttgttcac ttcttcgagc tcgattctac tcgagcgtgc | |
| | 9781 | tttcgttgct cgagagatta ccttgttaaa tccggtttgg atccattcca agaatactgg | |
| | 9841 | taaaccgttt tacgccattc ttcataggat tgatgttggt gttgttattg atttagagcc | |
| | 9901 | agctagaact gaagatcctg cgctttctat tgctggtgct gttcaatcgc agaaactcgc | |
| | 9961 | ggttcgtgcg atttctcagt tacaggctct tcctggtgga gatattaagc ttttgtgtga | |
| | 10021 | cactgtcgtg gaaagtgtga gggacttgac tggttatgat cgtgttatgg ttcataagtt | |
| | 10081 | tcatgaagat gagcatggag aagttgtagc tgagagtaaa cgagatgatt tagagcctta | |
| | 10141 | tattggactg cattatcctg ctactgatat tcctcaagcg tcaaggttct tgtttaagca | |
| | 10201 | gaaccgtgtc cgaatgatag tagattgcaa tgccacacct gttcttgtgg tccaggacga | |
| | 10261 | taggctaact cagtctatgt gcttggttgg ttctactctt agggctcctc atggttgtca | |
| | 10321 | ctctcagtat atggctaaca tgggatctat tgcgtcttta gcaatggcgg ttataatcaa | |
| | 10381 | tggaaatgaa gatgatggga gcaatgtagc tagtggaaga agctcgatga ggctttgggg | |
| | 10441 | tttggttgtt tgccatcaca cttcttctcg ctgcataccg tttccgctaa ggtatgcttg | |
| | 10501 | tgagtttttg atgcaggctt tcggtttaca gttaaacatg gaattgcagt tagctttgca | |
| | 10561 | aatgtcagag aaacgcgttt tgagaacgca gacactgtta tgtgatatgc ttctgcgtga | |
| | 10621 | ctcgcctgct ggaattgtta cacagagtcc cagtatcatg gacttagtga aatgtgacgg | |
| | 10681 | tgcagcattt ctttaccacg ggaagtatta cccgttgggt gttgctccta gtgaagttca | |
| | 10741 | gataaaagat gttgtggagt ggttgcttgc gaatcatgcg gattcaaccg gattaagcac | |
| | 10801 | tgatagttta ggcgatgcgg ggtatcccgg tgcagctgcg ttaggggatg ctgtgtgcgg | |
| | 10861 | tatggcagtt gcatatatca caaaaagaga ctttcttttt tggtttcgat ctcacactgc | |
| | 10921 | gaaagaaatc aaatggggag gcgctaagca tcatccggag gataaagatg atgggcaacg | |
| | 10981 | aatgcatcct cgttcgtcct ttcaggcttt tcttgaagtt gttaagagcc ggagtcagcc | |
| | 11041 | atgggaaact gcggaaatgg atgcgattca ctcgctccag cttattctga gagactcttt | |
| | 11101 | taaagaatct gaggcggcta tgaactctaa agttgtggat ggtgtggttc agccatgtag | |
| | 11161 | ggatatggcg ggggaacagg ggattgatga gttaggtgca gttgcaagag agatggttag | |
| | 11221 | gctcattgag actgcaactg ttcctatatt cgctgtggat gccggaggct gcatcaatgg | |
| | 11281 | atggaacgct aagattgcag agttgacagg tctctcagtt gaagaagcta tggggaagtc | |
| | 11341 | tctggtttct gatttaatat acaaagagaa tgaagcaact gtcaataagc ttctttctcg | |
| | 11401 | tgctttgaga ggggacgagg aaaagaatgt ggaggttaag ctgaaaactt tcagccccga | |
| | 11461 | actacaaggg aaagcagttt ttgtggttgt gaatgcttgt tccagcaagg actacttgaa | |
| | 11521 | caacattgtc ggcgtttgtt ttgttggaca agacgttact agtcagaaaa tcgtaatgga | |
| | 11581 | taagttcatc aacatacaag gagattacaa ggctattgta catagcccaa accctctaat | |
| | 11641 | cccgccaatt tttgctgctg acgagaacac gtgctgcctg gaatggaaca tggcgatgga | |
| | 11701 | aaagcttacg ggttggtctc gcagtgaagt gattgggaaa atgattgtcg gggaagtgtt | |
| | 11761 | tgggagctgt tgcatgctaa agggtcctga tgctttaacc aagttcatga ttgtattgca | |
| | 11821 | taatgcgatt ggtggccaag atacggataa gttccctttc ccattctttg accgcaatgg | |
| | 11881 | gaagtttgtt caggctctat tgactgcaaa caagcgggtt agcctcgagg gaaaggttat | |
| | 11941 | tggggctttc tgtttcttgc aaatcccgag ccctgagctg cagcaagctt tagcagtcca | |
| | 12001 | acggaggcag gacacagagt gtttcacgaa ggcaaaagag ttggcttata tttgtcaggt | |
| | 12061 | gataaagaat cctttgagcg gtatgcgttt cgcaaactca ttgttggagg ccacagactt | |
| | 12121 | gaacgaggac cagaagcagt tacttgaaac aagtgtttct tgcgagaaac agatctcaag | |
| | 12181 | gatcgtcggg gacatggatc ttgaaagcat tgaagacggt tcatttgtgc taaagaggga | |
| | 12241 | agagtttttc cttggaagtg tcataaacgc gattgtaagt caagcgatgt tcttattaag | |
| | 12301 | ggacagaggt cttcagctga tccgtgacat tcccgaagag atcaaatcaa tagaggtttt | |
| | 12361 | tggagaccag ataaggattc aacagctcct ggctgagttt ctgctgagta taatccggta | |
| | 12421 | tgcaccatct caagagtggg tggagatcca tttaagccaa ctttcaaagc aaatggctga | |
| | 12481 | tggattcgcc gccatccgca cagaattcag aatggcgtgt ccaggtgaag gtctgcctcc | |
| | 12541 | agagctagtc cgagacatgt tccatagcag caggtggaca agccctgaag gtttaggtct | |
| | 12601 | aagcgtatgt cgaaagattt taaagctaat gaacggtgag gttcaataca tccgagaatc | |
| | 12661 | agaacggtcc tatttcctca tcattctgga actccctgta cctcgaaagc gaccattgtc | |
| | 12721 | aactgctagt ggaagtggtg acatgatgct gatgatgcca tataagggtg ggcgcgccga | |
| | 12781 | cccagctttc ttgtacaaag tggtgcgaat ggtgaacaag ggcgaggagc tgttcaccgg | |
| | 12841 | ggtggtgccc atcctggtcg agctggacgg cgacgtaaac ggccacaagt tcagcgtgtc | |
| | 12901 | cggcgagggc gagggcgatg ccacctacgg caagctgacc ctgaagttca tctgcaccac | |
| | 12961 | cggcaagctg cccgtgccct ggcccaccct cgtgaccacc ctgacctggg gcgtgcagtg | |
| | 13021 | cttcgcccgc taccccgacc acatgaagca gcacgacttc ttcaagtccg ccatgcccga | |
| | 13081 | aggctacgtc caggagcgca ccatcttctt caaggacgac ggcaactaca agacccgcgc | |
| | 13141 | cgaggtgaag ttcgagggcg acaccctggt gaaccgcatc gagctgaagg gcatcgactt | |
| | 13201 | caaggaggac ggcaacatcc tggggcacaa gctggagtac aacgccatca gcgacaacgt | |
| | 13261 | ctatatcacc gccgacaagc agaagaacgg catcaaggcc aacttcaaga tccgccacaa | |
| | 13321 | catcgaggac ggcagcgtgc agctcgccga ccactaccag cagaacaccc ccatcggcga | |
| | 13381 | cggccccgtg ctgctgcccg acaaccacta cctgagcacc cagtccaagc tgagcaaaga | |
| | 13441 | ccccaacgag aagcgcgatc acatggtcct gctggagttc gtgaccgccg ccgggatcac | |
| | 13501 | tctcggcatg gacgagctgt acaagtctag gggtggaagc tggagccacc ctcaatttga | |
| | 13561 | aaagggagga ggatctggag gtggttctgg tggtggttct tggtctcacc cacaattcga | |
| | 13621 | aaagggttct tacccatacg atgttccaga ttacgctcat caccatcacc atcactaggg | |
| | 13681 | tggtgatatc ccgcggccat gctagagtcc gcaaaaatca ccagtctctc tctacaaatc | |
| | 13741 | tatctctctc tatttttctc cagaataatg tgtgagtagt tcccagataa gggaattagg | |
| | 13801 | gttcttatag ggtttcgctc atgtgttgag catataagaa acccttagta tgtatttgta | |
| | 13861 | tttgtaaaat acttctatca ataaaatttc taattcctaa aaccaaaatc cagtgacctg | |
| | 13921 | caggcatgcg acgtcg | |
| 20 | 1 | atgaagagag ggaaatatga ggagaagata cttgagccga tgtttcctcg acttcatgtg | Thlaspi arvensi |
| | 61 | aacgatgctg ataaaggagg gcctagagct cctccaagaa acaagatggc tctctatgag | wt ELF3 cDNA |
| | 121 | caacttagca tcccttctca gaggtttagt agtgatcatg gatcgttgcc tcgtaacacc | |
| | 181 | agcactttgg ttcctcctgt tggatcatct agtcagcctt gtagcgtgga aagaaactta | |
| | 241 | tctgcccagc atcttgattc ttcagctgca gtccatgcaa ctgagaagtt tgtctcccaa | |
| | 301 | atgtcgttca tggaaaatgt gagaattttg gcacagcatg atcagaaaaa attagtaaga | |
| | 361 | gaggaggatg atttcgcagt tccagtattt attaactcaa gaagatttca gtctcatggc | |
| | 421 | agaaccaaga gaggtgttga gaaggaaaga cacaccacat tggtcaaggg gagcgctaag | |
| | 481 | cgaggtggct ttgtaaactc tgtggatgta tcagctacag aggaaatgga tcttgaaaaa | |
| | 541 | tcatcatcga gttgtgacag agttaatgat tgtaatgatt ccttgagaga ggagtctaga | |
| | 601 | aataggttag gccgagatgg tggtgaaact cgagcgatgg acactgataa tggagttgaa | |
| | 661 | tctcacttgg gatcagaatg tcattcagaa gagggtcatg acaatcctaa tgacgttgat | |
| | 721 | aatggtcgtg aatactgcac aagtagagga tatgtctctc tgcagcagat aaatgaagag | |
| | 781 | gcgagcgatg atgtttctga tgattcgatg gtggattcta tatccagcat agatgtctct | |
| | 841 | cctgatgacg ttgtgggagt attaggtcaa aaacgtttct ggagagcaag gaaagctatt | |
| | 901 | gccaatcaac aaagagtatt tgctgttcaa ctatttgagt tgcacagact gattaaggta | |
| | 961 | caaagactta ttgctgcatc accggatgtc ttgctcgatg acatcagtta tcttggaaaa | |
| | 1021 | gtcgctgtta aaagctttcc agtgaagaag ctccttccat cagagaagcc tcctctacca | |
| | 1081 | caagttatca aacacagcgg ccgcgactcc gcggagaaga ccgaccaaca taaaatggaa | |
| | 1141 | tgctcggctg agaacgtagt cgggaagatg tcaaaccaag ttcatcatca accttccaac | |
| | 1201 | tacatgcctt ttccgagcaa ccaagccact gctaatggat gttactttcc tccccagcct | |
| | 1261 | cctacttcag gaggaaatca gcaatggtta atccctgtaa tgtctccttc cgaaggtctg | |
| | 1321 | atatacaagc cgcatccagg tccaggacac acaggacctc cggtctgtgg agggtattat | |
| | 1381 | ggtcattaca tgcctgctcc tatggtaatg ggtaatttca tgggcggtgg tggtcaacct | |
| | 1441 | ccgtttcacc cggggatggg ccttgcatct ctgggtaatg gctacttccc tccttatggt | |
| | 1501 | ataatgccac acaccatgat gaatacttat tgctccggcc aacaacaaca acaacaaccc | |
| | 1561 | aatgagcata tgaatcagtt tgggcattca gtaaatcttc agaacgcatc aggtttgaac | |
| | 1621 | aaccaacaac agagctcggt taacgaagag gcggcgcaac aacagccggc gaaatcatat | |
| | 1681 | catcgggcta gaaagagcag gcaagggagc acaggaagca gcagttcaga gggaatctcc | |
| | 1741 | ggtaagaact cctttcggcc attctcagcg gttgatgagg acagcatcaa cgaccaacct | |
| | 1801 | gagcaaatga tgacgacaac gacgaccaca acaagaacaa ctgttactca gacgacaaga | |
| | 1861 | gatggagtag gaggagtgac gagagtgatc aaagtggttc cacacaacgc gaagctggcg | |
| | 1921 | agtgagtatg ctgcaaggat tttccggtca attcaagaag aacgtaaaca ctacgactcc | |
| | 1981 | ttctctaacc actcttaa | |
| 21 | MKRGKYEEKILEPMFPRLHVNDADKGGPRAPPRNKMALYEQLSIPSQRFSSDHGSLPRNTSTLVPPVGSSS | | Thlaspi arvensi |
| | QPCSVERNLSAQHLDSSAAVHATEKFVSQMSFMENVRILAQHDQKKLVREEDDFAVPVFINSRRFQSHGRT | | wt ELF3 protein |
| | KRGVEKERHTTLVKGSAKRGGFVNSVDVSATEEMDLEKSSSSCDRVNDCNDSLREESRNRLGRDGGETRAM | | |
| | DTDNGVESHLGSECHSEEGHDNPNDVDNGREYCTSRGYVSLOQINEEASDDVSDDSMVDSISSIDVSPDDV | | |
| | VGVLGQKRFWRARKAIANQQRVFAVOLFELHRLIKVORLIAASPDVLLDDISYLGKVAVKSFPVKKLLPSE | | |
| | KPPLPQVIKHSGRDSAEKTDQHKMECSAENVVGKMSNQVHHQPSNYMPFPSNQATANGCYFPPOPPTSGGN | | |
| | QQWLIPVMSPSEGLIYKPHPGPGHTGPPVCGGYYGHYMPAPMVMGNFMGGGGQPPFHPGMGLASLGNGYFP | | |
| | PYGIMPHTMMNTYCSGQQQQQQPNEHMNQFGHSVNLONASGLNNOQQSSVNEEAAQQQPAKSYHRARKSRQ | | |
| | GSTGSSSSEGISGKNSFRPFSAVDEDSINDQPEQMMTTTTTTTRTTVTQTTRDGVGGVTRVIKVVPHNAKL | | |
| | ASEYAARIFRSIQEERKHYDSFSNHS- | | |
| 22 | AGCGAGGTGGCTTTGTAAACTCTGTGGATGTATCAGCTACAGAGGAAATG | | Large deletion |
| | GATCTTGAAAAATCATCATCGAGTTGTGACAGAGTTAATGATTGTAATGATTCCTTGA | | in Thlaspi |
| | GAGAGGAGTCTAGAAATAGGTTAGGCCGAGATGGTGGTGAAACTCGAGCGATGGACAC | | arvensi ELF3 |
| | TGATAATGGAGTTGAATCTCACTTGGGATCAGAATGTCATTCAGAAGAGGGTCATGAC | | (Taelf3-1). |
| | AATCCTAATGACGTTGATAATGGTCGTGAATACTGCACAAGTAGAGGATATGTCTCTC | | Shows sequence |
| | TGCAGCAGATAAATGAAGAGGCGAGCGATGATGTTTCTGATGATTCGATGGTGGATTC | | deleted from |
| | TATATCCAGCATAGATGTCTCTCCTGATGACGTTGTGGGAGTATTAGGTCAAAAACGT | | ELF3. See FIG. |
| | TTCTGGAGAGCAAGGAAAGCTATTGCCAATCAACAAAGAGTATTTGCTGTTCAACTAT | | 13 |
| | TTGAGTTGCACAGACTGATTAAGGTACAAAGACTTATTGCTGCATCACCGGATGTCTT | | |
| | GCTCGATGACATCAGTTATCTTGGAAAAGTCGCTGTTAAAAGCTTTCCAGTGAAGAAG | | |
| | CTCCTTCCATCAGAGAAGCCTCCTCTACCACAAGTTATCAAAC | | |
| 23 | ATTGTATGAAGAGAGGGAATGATGTTTTAGAGCTAGAAATAGCAAGTTAAAATAAGGCTAGTCCGTTATCA | | Expression |
| | ACTTGAAAAAGTGGCACCGAGTCGGTGCTTTTTTTTGCAAAATTTTCCAGATCGATTTCTTCTTCCTCTGT | | construct for |
| | TCTTCGGCGTTCAATTTCTGGGGTTTTCTCTTCGTTTTCTGTAACTGAAACCTAAAATTTGACCTAAAAAA | | expressing |
| | AATCTCAAATAATATGATTCAGTGGTTTTGTACTTTTCAGTTAGTTGAGTTTTGCAGTTCCGATGAGATAA | | gRNAs of |
| | ACCAATATTAATCCAAACTACTGCAGCCTGACAGACAAATGAGGATGCAAACAATTTTAAAGTTTATCTAA | | phse401-basil- |
| | CGCTAGCTGTTTTGTTTCTTCTCTCTGGTGCACCAACGACGGCGTTTTCTCAATCATAAAGAGGCTTGTTT | | x4 CRISPR |
| | TACTTAAGGCCAATAATGTTGATGGATCGAAAGAAGAGGGCTTTTAATAAACGAGCCCGTTTAAGCTGTAA | | construct (SEQ |
| | ACGATGTCAAAAACATCCCACATCGTTCAGTTGAAAATAGAAGCTCTGTTTATATATTGGTAGAGTCGACT | | ID NO: 37) to |
| | AAGAGATTGGCGTTGTTAGTCGGGTTTCGTTTTAGAGCTAGAAATAGCAAGTTAAAATAAGGCTAGTCCGT | | disrupt elf3 in |
| | TATCAACTTGAAAAAGTGGCACCGAGTCGGTGCTTTTTTTGGATAGAATTTCCCAGCTTTTTTGCGTGTTT | | basil |
| | CAGCTCTCATGATCCTTGGCCAATGGGTGTAGTAAATTTTCTGCACATTCATTGGATGGAAAATAATGGTT | | |
| | TTAGCTTTAGGGAATAAGAAAAGTGTATAGGAAGGGGATTTTTGTACAATCACATTTGAATTAGGTCTTTG | | |
| | AAATGACAGGGAATGAGGACATATGATGAGACGGTCATTGTTTTAGTTCCACCACGATTATATTTGAAATT | | |
| | TACGTGAGTGTGAGTGAGACTTGCATAAGAAAATAAAATCTTTAGTTGGGAAAAAATTCAATAATATAAAT | | |
| | GGGCTTGAGAAGGAAGCGAGGGATAGGCCTTTTTCTAAAATAGGCCCATTTAAGCTATTAACAATCTTCAA | | |
| | AAGTACCACAGCGCTTAGGTAAAGAAAGCAGCTGAGTTTATATATGGTTAGAGACGAAGTAGTGATTGAAT | | |
| | CGGTGAGTCTGTGGGAGTTTTAGAGCTAGAAATAGCAAGTTAAAATAAGGCTAGTCCGTTATCAACTTGAA | | |
| | AAAGTGGCACCGAGTCGGTGCTTTTTTTTGGCAAAAATTTTCAGATTTTTTCTTCATCTGTAGATTTCTGG | | |
| | GTTTTTTTTTCCGTTTCGTGAATCATAAGTGAAGTTTTGGATGCAAATCTGCGCGAAAAAAGTTGGACCTG | | |
| | CAATGAGCTTATTTAGATAGCTAAGACAAAGTGATTGGTCCGTTCGACTTGCCTTCCGCACAATACATCAT | | |
| | TTCTTCTTAGCTTTTTTTCTTCTTCTTCGTTCATACAGTTTTTTTTTGTTTATCAGCTTACATTTTCTTGA | | |
| | ACCGTAGCTTTCGTTTTCTTCTTTTTAACTTTCCATTCGGAGTTTTTGTATCTTGTTTCATAGTTTGTCCC | | |
| | AGGATTAGAATGATTAGGCATCGAACCTTCAAGAATTTGATTGAATAAAACATCTTCATTCTTAAGATATG | | |
| | AAGATAATCTTCAAAAGGCCCCTGGGAATCTGAAAGAAGAGAAGCAGGCCCATTTATATGGGAAAGAACAA | | |
| | TAGTATTTCTTATATAGGCCCATTTAAGTTGAAAACAATCTTCAAAAGTCCCACATCGCTTAGATAAGAAA | | |
| | ACGAAGCTGAGTTTATATACAGCTAGAGTCGAAGTAGTGATTGACGGACGATTGAGACTAGAGTTTTAGAG | | |
| | CTAGAAATAGCAAGTTAAAATAAGGCTAGTCCGTTATCAACTTGAAAAAGTGGCACCGAGTCGGTGC | | |
| 24 | GACTAGAGCCAAGCTGATCTCCTTTGCCCCGGAGATCACCATGGACGACTTTCTCTATCTCTACGATCTAG | | A.t. YHB |
| | GAAGAAAGTTCGACGGAGAAGGTGACGATACCATGTTCACCACCGATAATGAGAAGATTAGCCTCTTCAAT | | expression |
| | TTCAGAAAGAATGCTGACCCACAGATGGTTAGAGAGGCCTACGCGGCAGGTCTCATCAAGACGATCTACCC | | construct from |
| | GAGTAATAATCTCCAGGAGATCAAATACCTTCCCAAGAAGGTTAAAGATGCAGTCAAAAGATTCAGGACTA | | SEQ ID NO 19 |
| | ACTGCATCAAGAACACAGAGAAAGATATATTTCTCAAGATCAGAAGTACTATTCCAGTATGGACGATTCAA | | |
| | GGCTTGCTTCATAAACCAAGGCAAGTAATAGAGATTGGAGTCTCTAAGAAAGTAGTTCCTACTGAATCAAA | | |
| | GGCCATGGAGTCAAAAATTCAGATCGAGGATCTAACAGAACTCGCCGTGAAGACTGGCGAACAGTTCATAC | | |
| | AGAGTCTTTTACGACTCAATGACAAGAAGAAAATCTTCGTCAACATGGTGGAGCACGACACTCTCGTCTAC | | |
| | TCCAAGAATATCAAAGATACAGTCTCAGAAGACCAAAGGGCTATTGAGACTTTTCAACAAAGGGTAATATC | | |
| | GGGAAACCTCCTCGGATTCCATTGCCCAGCTATCTGTCACTTCATCAAAAGGACAGTAGAAAAGGAAGGTG | | |
| | GCACCTACAAATGCCATCATTGCGATAAAGGAAAGGCTATCGTTCAAGATGCCTCTGCCGACAGTGGTCCC | | |
| | AAAGATGGACCCCCACCCACGAGGAGCATCGTGGAAAAAGAAGACGTTCCAACCACGTCTTCAAAGCAAGT | | |
| | GGATTGATGTGATATCTCCACTGACGTAAGGGATGACGCACAATCCCACTATCCTTCGCAAGACCCTTCCT | | |
| | CTATATAAGGAAGTTCATTTCATTTGGAGAGGACTCCGGTATTTTTACAACAATACCACAACAAAACAAAC | | |
| | AACAAACAACATTACAATTTACTATTCTAGTCGACCTGCAGGCGGCCGCACTAGTGATATCACAAGTTTGT | | |
| | ACAAAAAAGCAGGCTCCGCGGCCGCCCCCTTCACCATGGTTTCCGGAGTCGGGGGTAGTGGCGGTGGCCGT | | |
| | GGCGGTGGCCGTGGCGGAGAAGAAGAACCGTCGTCAAGTCACACTCCTAATAACCGAAGAGGAGGAGAACA | | |
| | AGCTCAATCGTCGGGAACGAAATCTCTCAGACCAAGAAGCAACACTGAATCAATGAGCAAAGCAATTCAAC | | |
| | AGTACACCGTCGACGCAAGACTCCACGCCGTTTTCGAACAATCCGGCGAATCAGGGAAATCATTCGACTAC | | |
| | TCACAATCACTCAAAACGACGACGTACGGTTCCTCTGTACCTGAGCAACAGATCACAGCTTATCTCTCTCG | | |
| | AATCCAGCGAGGTGGTTACATTCAGCCTTTCGGATGTATGATCGCCGTCGATGAATCCAGTTTCCGGATCA | | |
| | TCGGTTACAGTGAAAACGCCAGAGAAATGTTAGGGATTATGCCTCAATCTGTTCCTACTCTTGAGAAACCT | | |
| | GAGATTCTAGCTATGGGAACTGATGTGAGATCTTTGTTCACTTCTTCGAGCTCGATTCTACTCGAGCGTGC | | |
| | TTTCGTTGCTCGAGAGATTACCTTGTTAAATCCGGTTTGGATCCATTCCAAGAATACTGGTAAACCGTTTT | | |
| | ACGCCATTCTTCATAGGATTGATGTTGGTGTTGTTATTGATTTAGAGCCAGCTAGAACTGAAGATCCTGCG | | |
| | CTTTCTATTGCTGGTGCTGTTCAATCGCAGAAACTCGCGGTTCGTGCGATTTCTCAGTTACAGGCTCTTCC | | |
| | TGGTGGAGATATTAAGCTTTTGTGTGACACTGTCGTGGAAAGTGTGAGGGACTTGACTGGTTATGATCGTG | | |
| | TTATGGTTCATAAGTTTCATGAAGATGAGCATGGAGAAGTTGTAGCTGAGAGTAAACGAGATGATTTAGAG | | |
| | CCTTATATTGGACTGCATTATCCTGCTACTGATATTCCTCAAGCGTCAAGGTTCTTGTTTAAGCAGAACCG | | |
| | TGTCCGAATGATAGTAGATTGCAATGCCACACCTGTTCTTGTGGTCCAGGACGATAGGCTAACTCAGTCTA | | |
| | TGTGCTTGGTTGGTTCTACTCTTAGGGCTCCTCATGGTTGTCACTCTCAGTATATGGCTAACATGGGATCT | | |
| | ATTGCGTCTTTAGCAATGGCGGTTATAATCAATGGAAATGAAGATGATGGGAGCAATGTAGCTAGTGGAAG | | |
| | AAGCTCGATGAGGCTTTGGGGTTTGGTTGTTTGCCATCACACTTCTTCTCGCTGCATACCGTTTCCGCTAA | | |
| | GGTATGCTTGTGAGTTTTTGATGCAGGCTTTCGGTTTACAGTTAAACATGGAATTGCAGTTAGCTTTGCAA | | |
| | ATGTCAGAGAAACGCGTTTTGAGAACGCAGACACTGTTATGTGATATGCTTCTGCGTGACTCGCCTGCTGG | | |
| | AATTGTTACACAGAGTCCCAGTATCATGGACTTAGTGAAATGTGACGGTGCAGCATTTCTTTACCACGGGA | | |
| | AGTATTACCCGTTGGGTGTTGCTCCTAGTGAAGTTCAGATAAAAGATGTTGTGGAGTGGTTGCTTGCGAAT | | |
| | CATGCGGATTCAACCGGATTAAGCACTGATAGTTTAGGCGATGCGGGGTATCCCGGTGCAGCTGCGTTAGG | | |
| | GGATGCTGTGTGCGGTATGGCAGTTGCATATATCACAAAAAGAGACTTTCTTTTTTGGTTTCGATCTCACA | | |
| | CTGCGAAAGAAATCAAATGGGGAGGCGCTAAGCATCATCCGGAGGATAAAGATGATGGGCAACGAATGCAT | | |
| | CCTCGTTCGTCCTTTCAGGCTTTTCTTGAAGTTGTTAAGAGCCGGAGTCAGCCATGGGAAACTGCGGAAAT | | |
| | GGATGCGATTCACTCGCTCCAGCTTATTCTGAGAGACTCTTTTAAAGAATCTGAGGCGGCTATGAACTCTA | | |
| | AAGTTGTGGATGGTGTGGTTCAGCCATGTAGGGATATGGCGGGGGAACAGGGGATTGATGAGTTAGGTGCA | | |
| | GTTGCAAGAGAGATGGTTAGGCTCATTGAGACTGCAACTGTTCCTATATTCGCTGTGGATGCCGGAGGCTG | | |
| | CATCAATGGATGGAACGCTAAGATTGCAGAGTTGACAGGTCTCTCAGTTGAAGAAGCTATGGGGAAGTCTC | | |
| | TGGTTTCTGATTTAATATACAAAGAGAATGAAGCAACTGTCAATAAGCTTCTTTCTCGTGCTTTGAGAGGG | | |
| | GACGAGGAAAAGAATGTGGAGGTTAAGCTGAAAACTTTCAGCCCCGAACTACAAGGGAAAGCAGTTTTTGT | | |
| | GGTTGTGAATGCTTGTTCCAGCAAGGACTACTTGAACAACATTGTCGGCGTTTGTTTTGTTGGACAAGACG | | |
| | TTACTAGTCAGAAAATCGTAATGGATAAGTTCATCAACATACAAGGAGATTACAAGGCTATTGTACATAGC | | |
| | CCAAACCCTCTAATCCCGCCAATTTTTGCTGCTGACGAGAACACGTGCTGCCTGGAATGGAACATGGCGAT | | |
| | GGAAAAGCTTACGGGTTGGTCTCGCAGTGAAGTGATTGGGAAAATGATTGTCGGGGAAGTGTTTGGGAGCT | | |
| | GTTGCATGCTAAAGGGTCCTGATGCTTTAACCAAGTTCATGATTGTATTGCATAATGCGATTGGTGGCCAA | | |
| | GATACGGATAAGTTCCCTTTCCCATTCTTTGACCGCAATGGGAAGTTTGTTCAGGCTCTATTGACTGCAAA | | |
| | CAAGCGGGTTAGCCTCGAGGGAAAGGTTATTGGGGCTTTCTGTTTCTTGCAAATCCCGAGCCCTGAGCTGC | | |
| | AGCAAGCTTTAGCAGTCCAACGGAGGCAGGACACAGAGTGTTTCACGAAGGCAAAAGAGTTGGCTTATATT | | |
| | TGTCAGGTGATAAAGAATCCTTTGAGCGGTATGCGTTTCGCAAACTCATTGTTGGAGGCCACAGACTTGAA | | |
| | CGAGGACCAGAAGCAGTTACTTGAAACAAGTGTTTCTTGCGAGAAACAGATCTCAAGGATCGTCGGGGACA | | |
| | TGGATCTTGAAAGCATTGAAGACGGTTCATTTGTGCTAAAGAGGGAAGAGTTTTTCCTTGGAAGTGTCATA | | |
| | AACGCGATTGTAAGTCAAGCGATGTTCTTATTAAGGGACAGAGGTCTTCAGCTGATCCGTGACATTCCCGA | | |
| | AGAGATCAAATCAATAGAGGTTTTTGGAGACCAGATAAGGATTCAACAGCTCCTGGCTGAGTTTCTGCTGA | | |
| | GTATAATCCGGTATGCACCATCTCAAGAGTGGGTGGAGATCCATTTAAGCCAACTTTCAAAGCAAATGGCT | | |
| | GATGGATTCGCCGCCATCCGCACAGAATTCAGAATGGCGTGTCCAGGTGAAGGTCTGCCTCCAGAGCTAGT | | |
| | CCGAGACATGTTCCATAGCAGCAGGTGGACAAGCCCTGAAGGTTTAGGTCTAAGCGTATGTCGAAAGATTT | | |
| | TAAAGCTAATGAACGGTGAGGTTCAATACATCCGAGAATCAGAACGGTCCTATTTCCTCATCATTCTGGAA | | |
| | CTCCCTGTACCTCGAAAGCGACCATTGTCAACTGCTAGTGGAAGTGGTGACATGATGCTGATGATGCCATA | | |
| | TAAGGGTGGGCGCGCCGACCCAGCTTTCTTGTACAAAGTGGTGCGAATGGTGAACAAGGGCGAGGAGCTGT | | |
| | TCACCGGGGTGGTGCCCATCCTGGTCGAGCTGGACGGCGACGTAAACGGCCACAAGTTCAGCGTGTCCGGC | | |
| | GAGGGCGAGGGCGATGCCACCTACGGCAAGCTGACCCTGAAGTTCATCTGCACCACCGGCAAGCTGCCCGT | | |
| | GCCCTGGCCCACCCTCGTGACCACCCTGACCTGGGGCGTGCAGTGCTTCGCCCGCTACCCCGACCACATGA | | |
| | AGCAGCACGACTTCTTCAAGTCCGCCATGCCCGAAGGCTACGTCCAGGAGCGCACCATCTTCTTCAAGGAC | | |
| | GACGGCAACTACAAGACCCGCGCCGAGGTGAAGTTCGAGGGCGACACCCTGGTGAACCGCATCGAGCTGAA | | |
| | GGGCATCGACTTCAAGGAGGACGGCAACATCCTGGGGCACAAGCTGGAGTACAACGCCATCAGCGACAACG | | |
| | TCTATATCACCGCCGACAAGCAGAAGAACGGCATCAAGGCCAACTTCAAGATCCGCCACAACATCGAGGAC | | |
| | GGCAGCGTGCAGCTCGCCGACCACTACCAGCAGAACACCCCCATCGGCGACGGCCCCGTGCTGCTGCCCGA | | |
| | CAACCACTACCTGAGCACCCAGTCCAAGCTGAGCAAAGACCCCAACGAGAAGCGCGATCACATGGTCCTGC | | |
| | TGGAGTTCGTGACCGCCGCCGGGATCACTCTCGGCATGGACGAGCTGTACAAGTCTAGGGGTGGAAGCTGG | | |
| | AGCCACCCTCAATTTGAAAAGGGAGGAGGATCTGGAGGTGGTTCTGGTGGTGGTTCTTGGTCTCACCCACA | | |
| | ATTCGAAAAGGGTTCTTACCCATACGATGTTCCAGATTACGCTCATCACCATCACCATCACTAG | | |
| 25 | 1 | atggtttccg gaggtaacgg cggtagtggc cgcggacgtg gtgaagaagc agcgtcgtca | Thlaspi arvensi |
| | 61 | agtcaccgtg ccgaacgcag tctccacacc acaacttatc accggagaga acaagctcaa | version of YHB |
| | 121 | tcttctggga cgaaatcgct taggccgcaa aatcagccgc agagccacac tgaatcagtg | allele of phyB. |
| | 181 | agcaaagcca ttcaacagta caccgtcgac gcgaggctcc acgccgtctt cgaacagtct | cDNA |
| | 241 | ggcgagtccg gcaagtcgtt tgattactca cagtccctca aaacgacgac gtacgggtcc | TaPHYB_YHB_cDNA |
| | 301 | tctgtaccgg agcagcagat cacggcgtat ctctctagga tccagcgagg aggctacatc | |
| | 361 | cagcccttcg gatgtatgat cgccgtcgat gaatccacct tcagaatcat cggctacagc | |
| | 421 | gaaaacgcgc gggaaatgtt aggccttact cctcagtccg ttcctagcct cgagaaaccg | |
| | 481 | gagattctag cgatgggaac agatgtgcgc tctctcttca cggcgtcgag ctcaattctc | |
| | 541 | ctcgagcgtg ctttcgtggc tcgagaaatc acactgctga atccggtttg gatccactcc | |
| | 601 | aagaacaccg gtaagccctt ttacgcaatt ctccatagga tcgacgttgg agtcgttatc | |
| | 661 | gatttagagc cagctagaac cgaagatccg gcgctttcga tcgccggagc agtccaatcg | |
| | 721 | cagaagctcg cggttcgcgc gatttcacag ttacagtcgc ttcccggtgg ggacatcaag | |
| | 781 | cttctctgcg acactgttgt ggaaagcgtg agagacctca ctggacacga ccgtgtaatg | |
| | 841 | gtctacaagt ttcacgaaga cgagcacgga gaagttgtcg ccgagagccg gcgagaagat | |
| | 901 | ttagaacctt acatcggtct acattatccg gcaactgata ttcctcaagc gtcacggttc | |
| | 961 | ttattcaagc agaaccgtgt ccgtatgatc gtagattgcc acgccacacc ggttcttgtg | |
| | 1021 | gtccaggacg ataggctcac tcagtctatg tgcttggttg gttctactct aagggctcct | |
| | 1081 | cacggatgtc actctcagta tatggctaac atgggatcta ttgcatcttt agctatggca | |
| | 1141 | gttataataa acggcaacga agaagacggg ggcaatgtcg gtggtgggag aaactcaatg | |
| | 1201 | aggctttggg gtttagtcgt ttgccatcac acctcttctc gctgcatacc gtttcctcta | |
| | 1261 | aggtatgctt gcgagtttct aatgcaggca tttggtttac agttaaacat ggaactgcag | |
| | 1321 | ttagcattgc aaatgtcaga gaaacgcgtt ttgagaacgc agacactgtt atgcgatatg | |
| | 1381 | cttctgcgtg attctcctgc tgggattgtt acacagagtc ctagtatcat ggacttagtg | |
| | 1441 | aaatgtgacg gtgcagcgtt tctttaccat gggaagtact acccgttggg tgttgctccg | |
| | 1501 | acggaagttc aaataaaaga cgttgtcgag tggttgcttg cgagtcatgc ggattcgaca | |
| | 1561 | gggttaagca cggatagttt aggcgatgca ggatatcccg gtgcagctgc gttaggggat | |
| | 1621 | gctgtgtgcg gtatggcggt tgcgtatatc acaaaaagag actttctttt ctggttccgt | |
| | 1681 | tctcatactg ccaaagaaat caaatgggga ggcgctaagc atcatccaga ggacaaagat | |
| | 1741 | gatgggcaac ggatgcatcc tcgttcgtcc ttcaaggctt ttcttgaagt tgttaagagc | |
| | 1801 | aggagccagc catgggaaac tgcagaaatg gatgcgattc actcgctcca gcttattcta | |
| | 1861 | agagactctt ttaaagaatc agaggcagct atgaactcta aaaatgcaga gggtgcggtt | |
| | 1921 | cagccttgta gggatattgc gggaatgcag gggattgatg agttaggggc agttgcaaga | |
| | 1981 | gagatggtta ggctcattga aaccgctact gttcctatat ttgctgtgga cgctggaggc | |
| | 2041 | tgcattaatg gatggaacgc taagatggcg gaactgacag gtctctcggt tgaagaagct | |
| | 2101 | atggggaagt ctctggtttc tgatctaata tacaaagaga acgaagaaac tgttgataag | |
| | 2161 | ctcatttctc gtgctctgag aggggacgag gacaagaatg tggaggtgaa gctgaaaact | |
| | 2221 | ttcatccccg aacttgaagg gaatgcagtt tttgtggttg tgaatgcgtg ttcgagcaag | |
| | 2281 | gactacttga acaacattgt cggcgtctgt tttgtcggac aggatgtcac tggtcagaaa | |
| | 2341 | atcgtaatgg ataagttcat caacatacaa ggagactaca aggccattgt ccatagccca | |
| | 2401 | aacgcgctga ttccgccaat ctttgcggcg gacgagaaca cgtgctgcct tgagtggaac | |
| | 2461 | atcgcgatgg aaaagctcac gggttggtcc cgcagtgaag ttattgggaa aatgcttgtt | |
| | 2521 | ggggaagtgt ttggtagctg ttgcaggcta aagggtcatg atgctttaac caagttcatg | |
| | 2581 | attgcattgc ataacgcgat gggtggccaa gaaacggata agttcccttt cccgttcttt | |
| | 2641 | gaccgcaacg ggaagtttgt tcaggctcta ttgactgcaa acaagcgggt tagcctcgac | |
| | 2701 | ggaaaggtta ttggggcttt ctgcttcttg cagatcccga gtccggaact gcagcaagct | |
| | 2761 | ttagcagtcc aacggaggca ggacacagag tgtttcacga aggcgaaaga gctagcttac | |
| | 2821 | atttgtcagg tgataaagaa ccctttgagt ggtttgcgtt tcacaaactc actgctggaa | |
| | 2881 | gctacagact tgaacgaaga tcagaaagag ttccttgaaa cgagtgtttc ttgcgagaaa | |
| | 2941 | cagatctcga ggatcgtcag tgacatggat cttgaaagaa ttgaagacgg ttcatttgag | |
| | 3001 | ctagagagag cagagttttt cctcggaagt gtcataaacg cgatagtaag ccaggcgatg | |
| | 3061 | ttcttattaa gggagagggc tcttcagctg atccgtgaca ttcccgaaga gataaaatct | |
| | 3121 | atagctgttt atggagacca gacaaggatt caacagatcc tggctgagtt tcttctgagt | |
| | 3181 | ataatccggt atgcaccgtc tcaagagtgg gtggagatcc atctaagcca agttccgaag | |
| | 3241 | caaatggctg acggattctc cgctatccgc acagagttca gaatggcgtg cccaggtgaa | |
| | 3301 | ggtctgcctc cagagctggt ccgagacatg ttccatagca gcaggtggac gagtcctgaa | |
| | 3361 | gggttaggtc taagcgtgtg tcgaaagatt ctgaagctaa tgaacggtga ggttcaatac | |
| | 3421 | atccgagagt cggaacggtc ctatttcctc atcattctcg aactccctgt tcctctgaaa | |
| | 3481 | cgcccttttt caaccgctag cggcagcggc gacatgatgt tgatgatgcc atag | |
| 26 | MVSGGNGGSGRGRGEEAASSSHRAERSLHTTTYHRREQAQSSGTKSLRPQNQPQSHTESVSKAIQQYTVDA | | Thlaspi arvensi |
| | RLHAVFEQSGESGKSFDYSQSLKTTTYGSSVPEQQITAYLSRIORGGYIQPFGCMIAVDESTFRIIGYSEN | | version of YHB |
| | AREMLGLTPQSVPSLEKPEILAMGTDVRSLFTASSSILLERAFVAREITLLNPVWIHSKNTGKPFYAILHR | | allele of phyB. |
| | IDVGVVIDLEPARTEDPALSIAGAVQSQKLAVRAISQLQSLPGGDIKLLCDTVVESVRDLTGHDRVMVYKF | | Protein |
| | HEDEHGEVVAESRREDLEPYIGLHYPATDIPOASRFLFKONRVRMIVDCHATPVLVVODDRLTQSMCLVGS | | translated from |
| | TLRAPHGCHSQYMANMGSIASLAMAVIINGNEEDGGNVGGGRNSMRLWGLVVCHHTSSRCIPFPLRYACEF | | TaPHYB_YHB_cDNA |
| | LMQAFGLQLNMELQLALQMSEKRVLRTQTLLCDMLLRDSPAGIVTQSPSIMDLVKCDGAAFLYHGKYYPLG | | |
| | VAPTEVQIKDVVEWLLASHADSTGLSTDSLGDAGYPGAAALGDAVCGMAVAYITKRDFLFWFRSHTAKEIK | | |
| | WGGAKHHPEDKDDGORMHPRSSFKAFLEVVKSRSOPWETAEMDAIHSLOLILRDSFKESEAAMNSKNAEGA | | |
| | VQPCRDIAGMOGIDELGAVAREMVRLIETATVPIFAVDAGGCINGWNAKMAELTGLSVEEAMGKSLVSDLI | | |
| | YKENEETVDKLISRALRGDEDKNVEVKLKTFIPELEGNAVFVVVNACSSKDYLNNIVGVCFVGQDVTGQKI | | |
| | VMDKFINIQGDYKAIVHSPNALIPPIFAADENTCCLEWNIAMEKLTGWSRSEVIGKMLVGEVFGSCCRLKG | | |
| | HDALTKFMIALHNAMGGQETDKFPFPFFDRNGKFVCALLTANKRVSLDGKVIGAFCFLQIPSPELQQALAV | | |
| | QRRQDTECFTKAKELAYICQVIKNPLSGLRFTNSLLEATDLNEDQKEFLETSVSCEKQISRIVSDMDLERI | | |
| | EDGSFELERAEFFLGSVINAIVSQAMFLLRERALOLIRDIPEEIKSIAVYGDOTRIQQILAEFLLSIIRYA | | |
| | PSQEWVEIHLSQVPKOMADGFSAIRTEFRMACPGEGLPPELVRDMFHSSRWTSPEGLGLSVCRKILKLMNG | | |
| | EVQYIRESERSYFLIILELPVPLKRPFSTASGSGDMMLMMP- | | |
| 27 | 1 | atggtttccg gaggtaacgg cggtagtggc cgcggacgtg gtgaagaagc agcgtcgtca | WT TaPHYB_cDNA. |
| | 61 | agtcaccgtg ccgaacgcag tctccacacc acaacttatc accggagaga acaagctcaa | Thlaspi arvensi |
| | 121 | tcttctggga cgaaatcgct taggccgcaa aatcagccgc agagccacac tgaatcagtg | phyB wt cDNA |
| | 181 | agcaaagcca ttcaacagta caccgtcgac gcgaggctcc acgccgtctt cgaacagtct | |
| | 241 | ggcgagtccg gcaagtcgtt tgattactca cagtccctca aaacgacgac gtacgggtcc | |
| | 301 | tctgtaccgg agcagcagat cacggcgtat ctctctagga tccagcgagg aggctacatc | |
| | 361 | cagcccttcg gatgtatgat cgccgtcgat gaatccacct tcagaatcat cggctacagc | |
| | 421 | gaaaacgcgc gggaaatgtt aggccttact cctcagtccg ttcctagcct cgagaaaccg | |
| | 481 | gagattctag cgatgggaac agatgtgcgc tctctcttca cggcgtcgag ctcaattctc | |
| | 541 | ctcgagcgtg ctttcgtggc tcgagaaatc acactgctga atccggtttg gatccactcc | |
| | 601 | aagaacaccg gtaagccctt ttacgcaatt ctccatagga tcgacgttgg agtcgttatc | |
| | 661 | gatttagagc cagctagaac cgaagatccg gcgctttcga tcgccggagc agtccaatcg | |
| | 721 | cagaagctcg cggttcgcgc gatttcacag ttacagtcgc ttcccggtgg ggacatcaag | |
| | 781 | cttctctgcg acactgttgt ggaaagcgtg agagacctca ctggatacga ccgtgtaatg | |
| | 841 | gtctacaagt ttcacgaaga cgagcacgga gaagttgtcg ccgagagccg gcgagaagat | |
| | 901 | ttagaacctt acatcggtct acattatccg gcaactgata ttcctcaagc gtcacggttc | |
| | 961 | ttattcaagc agaaccgtgt ccgtatgatc gtagattgcc acgccacacc ggttcttgtg | |
| | 1021 | gtccaggacg ataggctcac tcagtctatg tgcttggttg gttctactct aagggctcct | |
| | 1081 | cacggatgtc actctcagta tatggctaac atgggatcta ttgcatcttt agctatggca | |
| | 1141 | gttataataa acggcaacga agaagacggg ggcaatgtcg gtggtgggag aaactcaatg | |
| | 1201 | aggctttggg gtttagtcgt ttgccatcac acctcttctc gctgcatacc gtttcctcta | |
| | 1261 | aggtatgctt gcgagtttct aatgcaggca tttggtttac agttaaacat ggaactgcag | |
| | 1321 | ttagcattgc aaatgtcaga gaaacgcgtt ttgagaacgc agacactgtt atgcgatatg | |
| | 1381 | cttctgcgtg attctcctgc tgggattgtt acacagagtc ctagtatcat ggacttagtg | |
| | 1441 | aaatgtgacg gtgcagcgtt tctttaccat gggaagtact acccgttggg tgttgctccg | |
| | 1501 | acggaagttc aaataaaaga cgttgtcgag tggttgcttg cgagtcatgc ggattcgaca | |
| | 1561 | gggttaagca cggatagttt aggcgatgca ggatatcccg gtgcagctgc gttaggggat | |
| | 1621 | gctgtgtgcg gtatggcggt tgcgtatatc acaaaaagag actttctttt ctggttccgt | |
| | 1681 | tctcatactg ccaaagaaat caaatgggga ggcgctaagc atcatccaga ggacaaagat | |
| | 1741 | gatgggcaac ggatgcatcc tcgttcgtcc ttcaaggctt ttcttgaagt tgttaagagc | |
| | 1801 | aggagccagc catgggaaac tgcagaaatg gatgcgattc actcgctcca gcttattcta | |
| | 1861 | agagactctt ttaaagaatc agaggcagct atgaactcta aaaatgcaga gggtgcggtt | |
| | 1921 | cagccttgta gggatattgc gggaatgcag gggattgatg agttaggggc agttgcaaga | |
| | 1981 | gagatggtta ggctcattga aaccgctact gttcctatat ttgctgtgga cgctggaggc | |
| | 2041 | tgcattaatg gatggaacgc taagatggcg gaactgacag gtctctcggt tgaagaagct | |
| | 2101 | atggggaagt ctctggtttc tgatctaata tacaaagaga acgaagaaac tgttgataag | |
| | 2161 | ctcatttctc gtgctctgag aggggacgag gacaagaatg tggaggtgaa gctgaaaact | |
| | 2221 | ttcatccccg aacttgaagg gaatgcagtt tttgtggttg tgaatgcgtg ttcgagcaag | |
| | 2281 | gactacttga acaacattgt cggcgtctgt tttgtcggac aggatgtcac tggtcagaaa | |
| | 2341 | atcgtaatgg ataagttcat caacatacaa ggagactaca aggccattgt ccatagccca | |
| | 2401 | aacgcgctga ttccgccaat ctttgcggcg gacgagaaca cgtgctgcct tgagtggaac | |
| | 2461 | atcgcgatgg aaaagctcac gggttggtcc cgcagtgaag ttattgggaa aatgcttgtt | |
| | 2521 | ggggaagtgt ttggtagctg ttgcaggcta aagggtcatg atgctttaac caagttcatg | |
| | 2581 | attgcattgc ataacgcgat gggtggccaa gaaacggata agttcccttt cccgttcttt | |
| | 2641 | gaccgcaacg ggaagtttgt tcaggctcta ttgactgcaa acaagcgggt tagcctcgac | |
| | 2701 | ggaaaggtta ttggggcttt ctgcttcttg cagatcccga gtccggaact gcagcaagct | |
| | 2761 | ttagcagtcc aacggaggca ggacacagag tgtttcacga aggcgaaaga gctagcttac | |
| | 2821 | atttgtcagg tgataaagaa ccctttgagt ggtttgcgtt tcacaaactc actgctggaa | |
| | 2881 | gctacagact tgaacgaaga tcagaaagag ttccttgaaa cgagtgtttc ttgcgagaaa | |
| | 2941 | cagatctcga ggatcgtcag tgacatggat cttgaaagaa ttgaagacgg ttcatttgag | |
| | 3001 | ctagagagag cagagttttt cctcggaagt gtcataaacg cgatagtaag ccaggcgatg | |
| | 3061 | ttcttattaa gggagagggc tcttcagctg atccgtgaca ttcccgaaga gataaaatct | |
| | 3121 | atagctgttt atggagacca gacaaggatt caacagatcc tggctgagtt tcttctgagt | |
| | 3181 | ataatccggt atgcaccgtc tcaagagtgg gtggagatcc atctaagcca agttccgaag | |
| | 3241 | caaatggctg acggattctc cgctatccgc acagagttca gaatggcgtg cccaggtgaa | |
| | 3301 | ggtctgcctc cagagctggt ccgagacatg ttccatagca gcaggtggac gagtcctgaa | |
| | 3361 | gggttaggtc taagcgtgtg tcgaaagatt ctgaagctaa tgaacggtga ggttcaatac | |
| | 3421 | atccgagagt cggaacggtc ctatttcctc atcattctcg aactccctgt tcctctgaaa | |
| | 3481 | cgcccttttt caaccgctag cggcagcggc gacatgatgt tgatgatgcc atag | |
| 28 | MVSGGNGGSGRGRGEEAASSSHRAERSLHTTTYHRREQAQSSGTKSLRPQNQPQSHTESVSKAIQQYTVDA | | TaPHYB_protein_ |
| | RLHAVFEQSGESGKSFDYSQSLKTTTYGSSVPEQQITAYLSRIORGGYIQPFGCMIAVDESTFRIIGYSEN | | sequence. |
| | AREMLGLTPQSVPSLEKPEILAMGTDVRSLFTASSSILLERAFVAREITLLNPVWIHSKNTGKPFYAILHR | | Encoded by SEQ |
| | IDVGVVIDLEPARTEDPALSIAGAVQSQKLAVRAISQLQSLPGGDIKLLCDTVVESVRDLTGYDRVMVYKF | | ID NO: 27 |
| | HEDEHGEVVAESRREDLEPYIGLHYPATDIPOASRFLFKONRVRMIVDCHATPVLVVODDRLTQSMCLVGS | | |
| | TLRAPHGCHSQYMANMGSIASLAMAVIINGNEEDGGNVGGGRNSMRLWGLVVCHHTSSRCIPFPLRYACEF | | |
| | LMQAFGLQLNMELQLALQMSEKRVLRTQTLLCDMLLRDSPAGIVTQSPSIMDLVKCDGAAFLYHGKYYPLG | | |
| | VAPTEVQIKDVVEWLLASHADSTGLSTDSLGDAGYPGAAALGDAVCGMAVAYITKRDFLFWFRSHTAKEIK | | |
| | WGGAKHHPEDKDDGORMHPRSSFKAFLEVVKSRSQPWETAEMDAIHSLQLILRDSFKESEAAMNSKNAEGA | | |
| | VQPCRDIAGMOGIDELGAVAREMVRLIETATVPIFAVDAGGCINGWNAKMAELTGLSVEEAMGKSLVSDLI | | |
| | YKENEETVDKLISRALRGDEDKNVEVKLKTFIPELEGNAVFVVVNACSSKDYLNNIVGVCFVGQDVTGQKI | | |
| | VMDKFINIQGDYKAIVHSPNALIPPIFAADENTCCLEWNIAMEKLTGWSRSEVIGKMLVGEVFGSCCRLKG | | |
| | HDALTKFMIALHNAMGGQETDKFPFPFFDRNGKFVCALLTANKRVSLDGKVIGAFCFLQIPSPELQQALAV | | |
| | QRRQDTECFTKAKELAYICQVIKNPLSGLRFTNSLLEATDLNEDQKEFLETSVSCEKQISRIVSDMDLERI | | |
| | EDGSFELERAEFFLGSVINAIVSQAMFLLRERALQLIRDIPEEIKSIAVYGDQTRIQQILAEFLLSIIRYA | | |
| | PSQEWVEIHLSQVPKOMADGFSAIRTEFRMACPGEGLPPELVRDMFHSSRWTSPEGLGLSVCRKILKLMNG | | |
| | EVOYIRESERSYFLIILELPVPLKRPFSTASGSGDMMLMMP | | |
| 29 | ATGGATTACAAGGACCACGACGGGGATTACAAGGACCACGACATTGATTACAAGGATGATGATGACAAGAT | | Cas9 DNA |
| | GGCTCCGAAGAAGAAGAGGAAGGTTGGCATCCACGGGGTGCCAGCTGCTGACAAGAAGTACTCGATCGGCC | | sequence |
| | TCGATATTGGGACTAACTCTGTTGGCTGGGCCGTGATCACCGACGAGTACAAGGTGCCCTCAAAGAAGTTC | | |
| | AAGGTCCTGGGCAACACCGATCGGCATTCCATCAAGAAGAATCTCATTGGCGCTCTCCTGTTCGACAGCGG | | |
| | CGAGACGGCTGAGGCTACGCGGCTCAAGCGCACCGCCCGCAGGCGGTACACGCGCAGGAAGAATCGCATCT | | |
| | GCTACCTGCAGGAGATTTTCTCCAACGAGATGGCGAAGGTTGACGATTCTTTCTTCCACAGGCTGGAGGAG | | |
| | TCATTCCTCGTGGAGGAGGATAAGAAGCACGAGCGGCATCCAATCTTCGGCAACATTGTCGACGAGGTTGC | | |
| | CTACCACGAGAAGTACCCTACGATCTACCATCTGCGGAAGAAGCTCGTGGACTCCACAGATAAGGCGGACC | | |
| | TCCGCCTGATCTACCTCGCTCTGGCCCACATGATTAAGTTCAGGGGCCATTTCCTGATCGAGGGGGATCTC | | |
| | AACCCGGACAATAGCGATGTTGACAAGCTGTTCATCCAGCTCGTGCAGACGTACAACCAGCTCTTCGAGGA | | |
| | GAACCCCATTAATGCGTCAGGCGTCGACGCGAAGGCTATCCTGTCCGCTAGGCTCTCGAAGTCTCGGCGCC | | |
| | TCGAGAACCTGATCGCCCAGCTGCCGGGCGAGAAGAAGAACGGCCTGTTCGGGAATCTCATTGCGCTCAGC | | |
| | CTGGGGCTCACGCCCAACTTCAAGTCGAATTTCGATCTCGCTGAGGACGCCAAGCTGCAGCTCTCCAAGGA | | |
| | CACATACGACGATGACCTGGATAACCTCCTGGCCCAGATCGGCGATCAGTACGCGGACCTGTTCCTCGCTG | | |
| | CCAAGAATCTGTCGGACGCCATCCTCCTGTCTGATATTCTCAGGGTGAACACCGAGATTACGAAGGCTCCG | | |
| | CTCTCAGCCTCCATGATCAAGCGCTACGACGAGCACCATCAGGATCTGACCCTCCTGAAGGCGCTGGTCAG | | |
| | GCAGCAGCTCCCCGAGAAGTACAAGGAGATCTTCTTCGATCAGTCGAAGAACGGCTACGCTGGGTACATTG | | |
| | ACGGCGGGGCCTCTCAGGAGGAGTTCTACAAGTTCATCAAGCCGATTCTGGAGAAGATGGACGGCACGGAG | | |
| | GAGCTGCTGGTGAAGCTCAATCGCGAGGACCTCCTGAGGAAGCAGCGGACATTCGATAACGGCAGCATCCC | | |
| | ACACCAGATTCATCTCGGGGAGCTGCACGCTATCCTGAGGAGGCAGGAGGACTTCTACCCTTTCCTCAAGG | | |
| | ATAACCGCGAGAAGATCGAGAAGATTCTGACTTTCAGGATCCCGTACTACGTCGGCCCACTCGCTAGGGGC | | |
| | AACTCCCGCTTCGCTTGGATGACCCGCAAGTCAGAGGAGACGATCACGCCGTGGAACTTCGAGGAGGTGGT | | |
| | CGACAAGGGCGCTAGCGCTCAGTCGTTCATCGAGAGGATGACGAATTTCGACAAGAACCTGCCAAATGAGA | | |
| | AGGTGCTCCCTAAGCACTCGCTCCTGTACGAGTACTTCACAGTCTACAACGAGCTGACTAAGGTGAAGTAT | | |
| | GTGACCGAGGGCATGAGGAAGCCGGCTTTCCTGTCTGGGGAGCAGAAGAAGGCCATCGTGGACCTCCTGTT | | |
| | CAAGACCAACCGGAAGGTCACGGTTAAGCAGCTCAAGGAGGACTACTTCAAGAAGATTGAGTGCTTCGATT | | |
| | CGGTCGAGATCTCTGGCGTTGAGGACCGCTTCAACGCCTCCCTGGGGACCTACCACGATCTCCTGAAGATC | | |
| | ATTAAGGATAAGGACTTCCTGGACAACGAGGAGAATGAGGATATCCTCGAGGACATTGTGCTGACACTCAC | | |
| | TCTGTTCGAGGACCGGGAGATGATCGAGGAGCGCCTGAAGACTTACGCCCATCTCTTCGATGACAAGGTCA | | |
| | TGAAGCAGCTCAAGAGGAGGAGGTACACCGGCTGGGGGAGGCTGAGCAGGAAGCTCATCAACGGCATTCGG | | |
| | GACAAGCAGTCCGGGAAGACGATCCTCGACTTCCTGAAGAGCGATGGCTTCGCGAACCGCAATTTCATGCA | | |
| | GCTGATTCACGATGACAGCCTCACATTCAAGGAGGATATCCAGAAGGCTCAGGTGAGCGGCCAGGGGGACT | | |
| | CGCTGCACGAGCATATCGCGAACCTCGCTGGCTCGCCAGCTATCAAGAAGGGGATTCTGCAGACCGTGAAG | | |
| | GTTGTGGACGAGCTGGTGAAGGTCATGGGCAGGCACAAGCCTGAGAACATCGTCATTGAGATGGCCCGGGA | | |
| | GAATCAGACCACGCAGAAGGGCCAGAAGAACTCACGCGAGAGGATGAAGAGGATCGAGGAGGGCATTAAGG | | |
| | AGCTGGGGTCCCAGATCCTCAAGGAGCACCCGGTGGAGAACACGCAGCTGCAGAATGAGAAGCTCTACCTG | | |
| | TACTACCTCCAGAATGGCCGCGATATGTATGTGGACCAGGAGCTGGATATTAACAGGCTCAGCGATTACGA | | |
| | CGTCGATCATATCGTTCCACAGTCATTCCTGAAGGATGACTCCATTGACAACAAGGTCCTCACCAGGTCGG | | |
| | ACAAGAACCGGGGCAAGTCTGATAATGTTCCTTCAGAGGAGGTCGTTAAGAAGATGAAGAACTACTGGCGC | | |
| | CAGCTCCTGAATGCCAAGCTGATCACGCAGCGGAAGTTCGATAACCTCACAAAGGCTGAGAGGGGGGGGCT | | |
| | CTCTGAGCTGGACAAGGCGGGCTTCATCAAGAGGCAGCTGGTCGAGACACGGCAGATCACTAAGCACGTTG | | |
| | CGCAGATTCTCGACTCACGGATGAACACTAAGTACGATGAGAATGACAAGCTGATCCGCGAGGTGAAGGTC | | |
| | ATCACCCTGAAGTCAAAGCTCGTCTCCGACTTCAGGAAGGATTTCCAGTTCTACAAGGTTCGGGAGATCAA | | |
| | CAATTACCACCATGCCCATGACGCGTACCTGAACGCGGTGGTCGGCACAGCTCTGATCAAGAAGTACCCAA | | |
| | AGCTCGAGAGCGAGTTCGTGTACGGGGACTACAAGGTTTACGATGTGAGGAAGATGATCGCCAAGTCGGAG | | |
| | CAGGAGATTGGCAAGGCTACCGCCAAGTACTTCTTCTACTCTAACATTATGAATTTCTTCAAGACAGAGAT | | |
| | CACTCTGGCCAATGGCGAGATCCGGAAGCGCCCCCTCATCGAGACGAACGGCGAGACGGGGGAGATCGTGT | | |
| | GGGACAAGGGCAGGGATTTCGCGACCGTCAGGAAGGTTCTCTCCATGCCACAAGTGAATATCGTCAAGAAG | | |
| | ACAGAGGTCCAGACTGGCGGGTTCTCTAAGGAGTCAATTCTGCCTAAGCGGAACAGCGACAAGCTCATCGC | | |
| | CCGCAAGAAGGACTGGGATCCGAAGAAGTACGGCGGGTTCGACAGCCCCACTGTGGCCTACTCGGTCCTGG | | |
| | TTGTGGCGAAGGTTGAGAAGGGCAAGTCCAAGAAGCTCAAGAGCGTGAAGGAGCTGCTGGGGATCACGATT | | |
| | ATGGAGCGCTCCAGCTTCGAGAAGAACCCGATCGATTTCCTGGAGGCGAAGGGCTACAAGGAGGTGAAGAA | | |
| | GGACCTGATCATTAAGCTCCCCAAGTACTCACTCTTCGAGCTGGAGAACGGCAGGAAGCGGATGCTGGCTT | | |
| | CCGCTGGCGAGCTGCAGAAGGGGAACGAGCTGGCTCTGCCGTCCAAGTATGTGAACTTCCTCTACCTGGCC | | |
| | TCCCACTACGAGAAGCTCAAGGGCAGCCCCGAGGACAACGAGCAGAAGCAGCTGTTCGTCGAGCAGCACAA | | |
| | GCATTACCTCGACGAGATCATTGAGCAGATTTCCGAGTTCTCCAAGCGCGTGATCCTGGCCGACGCGAATC | | |
| | TGGATAAGGTCCTCTCCGCGTACAACAAGCACCGCGACAAGCCAATCAGGGAGCAGGCTGAGAATATCATT | | |
| | CATCTCTTCACCCTGACGAACCTCGGCGCCCCTGCTGCTTTCAAGTACTTCGACACAACTATCGATCGCAA | | |
| | GAGGTACACAAGCACTAAGGAGGTCCTGGACGCGACCCTCATCCACCAGTCGATTACCGGCCTCTACGAGA | | |
| | CGCGCATCGACCTGTCTCAGCTCGGGGGCGACAAGCGGCCAGCGGCGACGAAGAAGGCGGGGCAGGCGAAG | | |
| | AAGAAGAAGTGA | | |
| 30 | GTCAAGGGGAGCGCTAAGCG | | gRNA1 from |
| | | | TaELF3 genomic |
| | | | sequence |
| 31 | CCACAAGTTATCAAACACAG | | gRNA2 from |
| | | | TaELF3 genomic |
| | | | sequence |
| 32 | 1 | gtttacccgc caatatatcc tgtcaaacac tgatagttta aactgaaggc gggaaacgac | pHEE401_TaELF3g |
| | 61 | aatctgatcc aagctcaagc tgctctagca ttcgccattc aggctgcgca actgttggga | RNA CRISPR |
| | 121 | agggcgatcg gtgcgggcct cttcgctatt acgccagctg gcgaaagggg gatgtgctgc | construct. |
| | 181 | aaggcgatta agttgggtaa cgccagggtt ttcccagtca cgacgttgta aaacgacggc | Base 254 to |
| | 241 | cagtgccaag cttcgacttg ccttccgcac aatacatcat ttcttcttag ctttttttct | base 1287 |
| | 301 | tcttcttcgt tcatacagtt tttttttgtt tatcagctta cattttcttg aaccgtagct | contains the U6 |
| | 361 | ttcgttttct tctttttaac tttccattcg gagtttttgt atcttgtttc atagtttgtc | promoter gRNA1 |
| | 421 | ccaggattag aatgattagg catcgaacct tcaagaattt gattgaataa aacatcttca | gRNA scaffold- |
| | 481 | ttcttaagat atgaagataa tcttcaaaag gcccctggga atctgaaaga agagaagcag | U6 terminator, |
| | 541 | gcccatttat atgggaaaga acaatagtat ttcttatata ggcccattta agttgaaaac | U6 promoter- |
| | 601 | aatcttcaaa agtcccacat cgcttagata agaaaacgaa gctgagttta tatacagcta | gRNA2 gRNA |
| | 661 | gagtcgaagt agtgattggt caaggggagc gctaagcggt tttagagcta gaaatagcaa | scaffold U6 |
| | 721 | gttaaaataa ggctagtccg ttatcaactt gaaaaagtgg caccgagtcg gtgctttttt | terminator. |
| | 781 | ttgcaaaatt ttccagatcg atttcttctt cctctgttct tcggcgttca atttctgggg | From 1552-7881 |
| | 841 | ttttctcttc gttttctgta actgaaacct aaaatttgac ctaaaaaaaa tctcaaataa | is the EC1 |
| | 901 | tatgattcag tggttttgta cttttcagtt agttgagttt tgcagttccg atgagataaa | promoter zCAS9 |
| | 961 | ccaatattaa tccaaactac tgcagcctga cagacaaatg aggatgcaaa caattttaaa | rbcS E9 |
| | 1021 | gtttatctaa cgctagctgt tttgtttctt ctctctggtg caccaacgac ggcgttttct | terminator |
| | 1081 | caatcataaa gaggcttgtt ttacttaagg ccaataatgt tgatggatcg aaagaagagg | |
| | 1141 | gcttttaata aacgagcccg tttaagctgt aaacgatgtc aaaaacatcc cacatcgttc | |
| | 1201 | agttgaaaat agaagctctg tttatatatt ggtagagtcg actaagagat tgccacaagt | |
| | 1261 | tatcaaacac aggttttaga gctagaaata gcaagttaaa ataaggctag tccgttatca | |
| | 1321 | acttgaaaaa gtggcaccga gtcggtgctt ttttttgcaa aattttccag atcgatttct | |
| | 1381 | tcttcctctg ttcttcggcg ttcaatttct ggggttttct cttcgttttc tgtaactgaa | |
| | 1441 | acctaaaatt tgacctaaaa aaaatctcaa ataatatgat tcagtggttt tgtacttttc | |
| | 1501 | agttagttga gttttgcagt tccgatgaga taaaccaata ccatggttat actagtgaat | |
| | 1561 | aaaagcattt gcgtttggtt tatcattgcg tttatacaag gacagagatc cactgagctg | |
| | 1621 | gaatagctta aaaccattat cagaacaaaa taaaccattt tttgttaaga atcagagcat | |
| | 1681 | agtaaacaac agaaacaacc taagagaggt aacttgtcca agaagatagc taattatatc | |
| | 1741 | tattttataa aagttatcat agtttgtaag tcacaaaaga tgcaaataac agagaaacta | |
| | 1801 | ggagacttga gaatatacat tcttgtatat ttgtattcga gattgtgaaa atttgaccat | |
| | 1861 | aagtttaaat tcttaaaaag atatatctga tctaggtgat ggttatagac tgtaatttta | |
| | 1921 | ccacatgttt aatgatggat agtgacacac atgacacatc gacaacacta tagcatctta | |
| | 1981 | tttagattac aacatgaaat ttttctgtaa tacatgtctt tgtacataat ttaaaagtaa | |
| | 2041 | ttcctaagaa atatatttat acaaggagtt taaagaaaac atagcataaa gttcaatgag | |
| | 2101 | tagtaaaaac catatacagt atatagcata aagttcaatg agtttattac aaaagcattg | |
| | 2161 | gttcactttc tgtaacacga cgttaaacct tcgtctccaa taggagcgct actgattcaa | |
| | 2221 | catgccaata tatactaaat acgtttctac agtcaaatgc tttaacgttt catgattaag | |
| | 2281 | tgactattta ccgtcaatcc tttcccattc ctcccactaa tccaactttt taattactct | |
| | 2341 | taaatcacca ctaagctagt aacgcctatc atgaattagc tctactaaat ctagcaacct | |
| | 2401 | ttcaaatttg cagtattgca ggtgtctctg tgtctttaaa atagttgcct tatgatttct | |
| | 2461 | tcggtttcaa gatgatcaaa tagttataga tttcatgctc acacatgctc attagatgtg | |
| | 2521 | tacatacttt acttacccaa atctattttc tcgcaaagat tttgatggta aagctgattt | |
| | 2581 | ggttctattg aactaaatca aacgagtttc agactgagtg attctaatcc ggcccattag | |
| | 2641 | cccctaaaca gacccactaa ttacgcagct tttaatagag taattacacc tagtttaccc | |
| | 2701 | actaaaccac taagcactaa ttatctcaca atctaatgag cttccctcgt aattacttgg | |
| | 2761 | gctttcactc taccatttat ttgtaacagt caagtctcta ctgtctctat ataaactctc | |
| | 2821 | taaagttaac acacaattct catcacaaac aaatcaacca aagcaacttc tactctttct | |
| | 2881 | tctttcgacc ttatcaatct gttgagaaat ctagatggat tacaaggacc acgacgggga | |
| | 2941 | ttacaaggac cacgacattg attacaagga tgatgatgac aagatggctc cgaagaagaa | |
| | 3001 | gaggaaggtt ggcatccacg gggtgccagc tgctgacaag aagtactcga tcggcctcga | |
| | 3061 | tattgggact aactctgttg gctgggccgt gatcaccgac gagtacaagg tgccctcaaa | |
| | 3121 | gaagttcaag gtcctgggca acaccgatcg gcattccatc aagaagaatc tcattggcgc | |
| | 3181 | tctcctgttc gacagcggcg agacggctga ggctacgcgg ctcaagcgca ccgcccgcag | |
| | 3241 | gcggtacacg cgcaggaaga atcgcatctg ctacctgcag gagattttct ccaacgagat | |
| | 3301 | ggcgaaggtt gacgattctt tcttccacag gctggaggag tcattcctcg tggaggagga | |
| | 3361 | taagaagcac gagcggcatc caatcttcgg caacattgtc gacgaggttg cctaccacga | |
| | 3421 | gaagtaccct acgatctacc atctgcggaa gaagctcgtg gactccacag ataaggcgga | |
| | 3481 | cctccgcctg atctacctcg ctctggccca catgattaag ttcaggggcc atttcctgat | |
| | 3541 | cgagggggat ctcaacccgg acaatagcga tgttgacaag ctgttcatcc agctcgtgca | |
| | 3601 | gacgtacaac cagctcttcg aggagaaccc cattaatgcg tcaggcgtcg acgcgaaggc | |
| | 3661 | tatcctgtcc gctaggctct cgaagtctcg gcgcctcgag aacctgatcg cccagctgcc | |
| | 3721 | gggcgagaag aagaacggcc tgttcgggaa tctcattgcg ctcagcctgg ggctcacgcc | |
| | 3781 | caacttcaag tcgaatttcg atctcgctga ggacgccaag ctgcagctct ccaaggacac | |
| | 3841 | atacgacgat gacctggata acctcctggc ccagatcggc gatcagtacg cggacctgtt | |
| | 3901 | cctcgctgcc aagaatctgt cggacgccat cctcctgtct gatattctca gggtgaacac | |
| | 3961 | cgagattacg aaggctccgc tctcagcctc catgatcaag cgctacgacg agcaccatca | |
| | 4021 | ggatctgacc ctcctgaagg cgctggtcag gcagcagctc cccgagaagt acaaggagat | |
| | 4081 | cttcttcgat cagtcgaaga acggctacgc tgggtacatt gacggcgggg cctctcagga | |
| | 4141 | ggagttctac aagttcatca agccgattct ggagaagatg gacggcacgg aggagctgct | |
| | 4201 | ggtgaagctc aatcgcgagg acctcctgag gaagcagcgg acattcgata acggcagcat | |
| | 4261 | cccacaccag attcatctcg gggagctgca cgctatcctg aggaggcagg aggacttcta | |
| | 4321 | ccctttcctc aaggataacc gcgagaagat cgagaagatt ctgactttca ggatcccgta | |
| | 4381 | ctacgtcggc ccactcgcta ggggcaactc ccgcttcgct tggatgaccc gcaagtcaga | |
| | 4441 | ggagacgatc acgccgtgga acttcgagga ggtggtcgac aagggcgcta gcgctcagtc | |
| | 4501 | gttcatcgag aggatgacga atttcgacaa gaacctgcca aatgagaagg tgctccctaa | |
| | 4561 | gcactcgctc ctgtacgagt acttcacagt ctacaacgag ctgactaagg tgaagtatgt | |
| | 4621 | gaccgagggc atgaggaagc cggctttcct gtctggggag cagaagaagg ccatcgtgga | |
| | 4681 | cctcctgttc aagaccaacc ggaaggtcac ggttaagcag ctcaaggagg actacttcaa | |
| | 4741 | gaagattgag tgcttcgatt cggtcgagat ctctggcgtt gaggaccgct tcaacgcctc | |
| | 4801 | cctggggacc taccacgatc tcctgaagat cattaaggat aaggacttcc tggacaacga | |
| | 4861 | ggagaatgag gatatcctcg aggacattgt gctgacactc actctgttcg aggaccggga | |
| | 4921 | gatgatcgag gagcgcctga agacttacgc ccatctcttc gatgacaagg tcatgaagca | |
| | 4981 | gctcaagagg aggaggtaca ccggctgggg gaggctgagc aggaagctca tcaacggcat | |
| | 5041 | tcgggacaag cagtccggga agacgatcct cgacttcctg aagagcgatg gcttcgcgaa | |
| | 5101 | ccgcaatttc atgcagctga ttcacgatga cagcctcaca ttcaaggagg atatccagaa | |
| | 5161 | ggctcaggtg agcggccagg gggactcgct gcacgagcat atcgcgaacc tcgctggctc | |
| | 5221 | gccagctatc aagaagggga ttctgcagac cgtgaaggtt gtggacgagc tggtgaaggt | |
| | 5281 | catgggcagg cacaagcctg agaacatcgt cattgagatg gcccgggaga atcagaccac | |
| | 5341 | gcagaagggc cagaagaact cacgcgagag gatgaagagg atcgaggagg gcattaagga | |
| | 5401 | gctggggtcc cagatcctca aggagcaccc ggtggagaac acgcagctgc agaatgagaa | |
| | 5461 | gctctacctg tactacctcc agaatggccg cgatatgtat gtggaccagg agctggatat | |
| | 5521 | taacaggctc agcgattacg acgtcgatca tatcgttcca cagtcattcc tgaaggatga | |
| | 5581 | ctccattgac aacaaggtcc tcaccaggtc ggacaagaac cggggcaagt ctgataatgt | |
| | 5641 | tccttcagag gaggtcgtta agaagatgaa gaactactgg cgccagctcc tgaatgccaa | |
| | 5701 | gctgatcacg cagcggaagt tcgataacct cacaaaggct gagaggggcg ggctctctga | |
| | 5761 | gctggacaag gcgggcttca tcaagaggca gctggtcgag acacggcaga tcactaagca | |
| | 5821 | cgttgcgcag attctcgact cacggatgaa cactaagtac gatgagaatg acaagctgat | |
| | 5881 | ccgcgaggtg aaggtcatca ccctgaagtc aaagctcgtc tccgacttca ggaaggattt | |
| | 5941 | ccagttctac aaggttcggg agatcaacaa ttaccaccat gcccatgacg cgtacctgaa | |
| | 6001 | cgcggtggtc ggcacagctc tgatcaagaa gtacccaaag ctcgagagcg agttcgtgta | |
| | 6061 | cggggactac aaggtttacg atgtgaggaa gatgatcgcc aagtcggagc aggagattgg | |
| | 6121 | caaggctacc gccaagtact tcttctactc taacattatg aatttcttca agacagagat | |
| | 6181 | cactctggcc aatggcgaga tccggaagcg ccccctcatc gagacgaacg gcgagacggg | |
| | 6241 | ggagatcgtg tgggacaagg gcagggattt cgcgaccgtc aggaaggttc tctccatgcc | |
| | 6301 | acaagtgaat atcgtcaaga agacagaggt ccagactggc gggttctcta aggagtcaat | |
| | 6361 | tctgcctaag cggaacagcg acaagctcat cgcccgcaag aaggactggg atccgaagaa | |
| | 6421 | gtacggcggg ttcgacagcc ccactgtggc ctactcggtc ctggttgtgg cgaaggttga | |
| | 6481 | gaagggcaag tccaagaagc tcaagagcgt gaaggagctg ctggggatca cgattatgga | |
| | 6541 | gcgctccagc ttcgagaaga acccgatcga tttcctggag gcgaagggct acaaggaggt | |
| | 6601 | gaagaaggac ctgatcatta agctccccaa gtactcactc ttcgagctgg agaacggcag | |
| | 6661 | gaagcggatg ctggcttccg ctggcgagct gcagaagggg aacgagctgg ctctgccgtc | |
| | 6721 | caagtatgtg aacttcctct acctggcctc ccactacgag aagctcaagg gcagccccga | |
| | 6781 | ggacaacgag cagaagcagc tgttcgtcga gcagcacaag cattacctcg acgagatcat | |
| | 6841 | tgagcagatt tccgagttct ccaagcgcgt gatcctggcc gacgcgaatc tggataaggt | |
| | 6901 | cctctccgcg tacaacaagc accgcgacaa gccaatcagg gagcaggctg agaatatcat | |
| | 6961 | tcatctcttc accctgacga acctcggcgc ccctgctgct ttcaagtact tcgacacaac | |
| | 7021 | tatcgatcgc aagaggtaca caagcactaa ggaggtcctg gacgcgaccc tcatccacca | |
| | 7081 | gtcgattacc ggcctctacg agacgcgcat cgacctgtct cagctcgggg gcgacaagcg | |
| | 7141 | gccagcggcg acgaagaagg cggggcaggc gaagaagaag aagtgagctc agagctttcg | |
| | 7201 | ttcgtatcat cggtttcgac aacgttcgtc aagttcaatg catcagtttc attgcgcaca | |
| | 7261 | caccagaatc ctactgagtt tgagtattat ggcattggga aaactgtttt tcttgtacca | |
| | 7321 | tttgttgtgc ttgtaattta ctgtgttttt tattcggttt tcgctatcga actgtgaaat | |
| | 7381 | ggaaatggat ggagaagagt taatgaatga tatggtcctt ttgttcattc tcaaattaat | |
| | 7441 | attatttgtt ttttctctta tttgttgtgt gttgaatttg aaattataag agatatgcaa | |
| | 7501 | acattttgtt ttgagtaaaa atgtgtcaaa tcgtggcctc taatgaccga agttaatatg | |
| | 7561 | aggagtaaaa cacttgtagt tgtaccatta tgcttattca ctaggcaaca aatatatttt | |
| | 7621 | cagacctaga aaagctgcaa atgttactga atacaagtat gtcctcttgt gttttagaca | |
| | 7681 | tttatgaact ttcctttatg taattttcca gaatccttgt cagattctaa tcattgcttt | |
| | 7741 | ataattatag ttatactcat ggatttgtag ttgagtatga aaatattttt taatgcattt | |
| | 7801 | tatgacttgc caattgattg acaacgaatt cgtaatcatg tcatagctgt ttcctgtgtg | |
| | 7861 | aaattgttat ccgctcacaa ttccacacaa catacgagcc ggaagcataa agtgtaaagc | |
| | 7921 | ctggggtgcc taatgagtga gctaactcac attaattgcg ttgcgctcac tgcccgcttt | |
| | 7981 | ccagtcggga aacctgtcgt gccagctgca ttaatgaatc ggccaacgcg cggggagagg | |
| | 8041 | cggtttgcgt attggctaga gcagcttgcc aacatggtgg agcacgacac tctcgtctac | |
| | 8101 | tccaagaata tcaaagatac agtctcagaa gaccaaaggg ctattgagac ttttcaacaa | |
| | 8161 | agggtaatat cgggaaacct cctcggattc cattgcccag ctatctgtca cttcatcaaa | |
| | 8221 | aggacagtag aaaaggaagg tggcacctac aaatgccatc attgcgataa aggaaaggct | |
| | 8281 | atcgttcaag atgcctctgc cgacagtggt cccaaagatg gacccccacc cacgaggagc | |
| | 8341 | atcgtggaaa aagaagacgt tccaaccacg tcttcaaagc aagtggattg atgtgataac | |
| | 8401 | atggtggagc acgacactct cgtctactcc aagaatatca aagatacagt ctcagaagac | |
| | 8461 | caaagggcta ttgagacttt tcaacaaagg gtaatatcgg gaaacctcct cggattccat | |
| | 8521 | tgcccagcta tctgtcactt catcaaaagg acagtagaaa aggaaggtgg cacctacaaa | |
| | 8581 | tgccatcatt gcgataaagg aaaggctatc gttcaagatg cctctgccga cagtggtccc | |
| | 8641 | aaagatggac ccccacccac gaggagcatc gtggaaaaag aagacgttcc aaccacgtct | |
| | 8701 | tcaaagcaag tggattgatg tgatatctcc actgacgtaa gggatgacgc acaatcccac | |
| | 8761 | tatccttcgc aagaccttcc tctatataag gaagttcatt tcatttggag aggacacgct | |
| | 8821 | gaaatcacca gtctctctct acaaatctat ctctctcgag ctttcgcaga tcccgggggg | |
| | 8881 | caatgagata tgaaaaagcc tgaactcacc gcgacgtctg tcgagaagtt tctgatcgaa | |
| | 8941 | aagttcgaca gcgtctccga cctgatgcag ctctcggagg gcgaagaatc tcgtgctttc | |
| | 9001 | agcttcgatg taggagggcg tggatatgtc ctgcgggtaa atagctgcgc cgatggtttc | |
| | 9061 | tacaaagatc gttatgttta tcggcacttt gcatcggccg cgctcccgat tccggaagtg | |
| | 9121 | cttgacattg gggagtttag cgagagcctg acctattgca tctcccgccg tgcacagggt | |
| | 9181 | gtcacgttgc aagacctgcc tgaaaccgaa ctgcccgctg ttctacaacc ggtcgcggag | |
| | 9241 | gctatggatg cgatcgctgc ggccgatctt agccagacga gcgggttcgg cccattcgga | |
| | 9301 | ccgcaaggaa tcggtcaata cactacatgg cgtgatttca tatgcgcgat tgctgatccc | |
| | 9361 | catgtgtatc actggcaaac tgtgatggac gacaccgtca gtgcgtccgt cgcgcaggct | |
| | 9421 | ctcgatgagc tgatgctttg ggccgaggac tgccccgaag tccggcacct cgtgcacgcg | |
| | 9481 | gatttcggct ccaacaatgt cctgacggac aatggccgca taacagcggt cattgactgg | |
| | 9541 | agcgaggcga tgttcgggga ttcccaatac gaggtcgcca acatcttctt ctggaggccg | |
| | 9601 | tggttggctt gtatggagca gcagacgcgc tacttcgagc ggaggcatcc ggagcttgca | |
| | 9661 | ggatcgccac gactccgggc gtatatgctc cgcattggtc ttgaccaact ctatcagagc | |
| | 9721 | ttggttgacg gcaatttcga tgatgcagct tgggcgcagg gtcgatgcga cgcaatcgtc | |
| | 9781 | cgatccggag ccgggactgt cgggcgtaca caaatcgccc gcagaagcgc ggccgtctgg | |
| | 9841 | accgatggct gtgtagaagt actcgccgat agtggaaacc gacgccccag cactcgtccg | |
| | 9901 | agggcaaaga aatagagtag atgccgaccg gatctgtcga tcgacaagct cgagtttctc | |
| | 9961 | cataataatg tgtgagtagt tcccagataa gggaattagg gttcctatag ggtttcgctc | |
| | 10021 | atgtgttgag catataagaa acccttagta tgtatttgta tttgtaaaat acttctatca | |
| | 10081 | ataaaatttc taattcctaa aaccaaaatc cagtactaaa atccagatcc cccgaattaa | |
| | 10141 | ttcggcgtta attcagtaca ttaaaaacgt ccgcaatgtg ttattaagtt gtctaagcgt | |
| | 10201 | caatttgttt acaccacaat atatcctgcc accagccagc caacagctcc ccgaccggca | |
| | 10261 | gctcggcaca aaatcaccac tcgatacagg cagcccatca gtccgggacg gcgtcagcgg | |
| | 10321 | gagagccgtt gtaaggcggc agactttgct catgttaccg atgctattcg gaagaacggc | |
| | 10381 | aactaagctg ccgggtttga aacacggatg atctcgcgga gggtagcatg ttgattgtaa | |
| | 10441 | cgatgacaga gcgttgctgc ctgtgatcac cgcggtttca aaatcggctc cgtcgatact | |
| | 10501 | atgttatacg ccaactttga aaacaacttt gaaaaagctg ttttctggta tttaaggttt | |
| | 10561 | tagaatgcaa ggaacagtga attggagttc gtcttgttat aattagcttc ttggggtatc | |
| | 10621 | tttaaatact gtagaaaaga ggaaggaaat aataaatggc taaaatgaga atatcaccgg | |
| | 10681 | aattgaaaaa actgatcgaa aaataccgct gcgtaaaaga tacggaagga atgtctcctg | |
| | 10741 | ctaaggtata taagctggtg ggagaaaatg aaaacctata tttaaaaatg acggacagcc | |
| | 10801 | ggtataaagg gaccacctat gatgtggaac gggaaaagga catgatgcta tggctggaag | |
| | 10861 | gaaagctgcc tgttccaaag gtcctgcact ttgaacggca tgatggctgg agcaatctgc | |
| | 10921 | tcatgagtga ggccgatggc gtcctttgct cggaagagta tgaagatgaa caaagccctg | |
| | 10981 | aaaagattat cgagctgtat gcggagtgca tcaggctctt tcactccatc gacatatcgg | |
| | 11041 | attgtcccta tacgaatagc ttagacagcc gcttagccga attggattac ttactgaata | |
| | 11101 | acgatctggc cgatgtggat tgcgaaaact gggaagaaga cactccattt aaagatccgc | |
| | 11161 | gcgagctgta tgatttttta aagacggaaa agcccgaaga ggaacttgtc ttttcccacg | |
| | 11221 | gcgacctggg agacagcaac atctttgtga aagatggcaa agtaagtggc tttattgatc | |
| | 11281 | ttgggagaag cggcagggcg gacaagtggt atgacattgc cttctgcgtc cggtcgatca | |
| | 11341 | gggaggatat cggggaagaa cagtatgtcg agctattttt tgacttactg gggatcaagc | |
| | 11401 | ctgattggga gaaaataaaa tattatattt tactggatga attgttttag tacctagaat | |
| | 11461 | gcatgaccaa aatcccttaa cgtgagtttt cgttccactg agcgtcagac cccgtagaaa | |
| | 11521 | agatcaaagg atcttcttga gatccttttt ttctgcgcgt aatctgctgc ttgcaaacaa | |
| | 11581 | aaaaaccacc gctaccagcg gtggtttgtt tgccggatca agagctacca actctttttc | |
| | 11641 | cgaaggtaac tggcttcagc agagcgcaga taccaaatac tgtccttcta gtgtagccgt | |
| | 11701 | agttaggcca ccacttcaag aactctgtag caccgcctac atacctcgct ctgctaatcc | |
| | 11761 | tgttaccagt ggctgctgcc agtggcgata agtcgtgtct taccgggttg gactcaagac | |
| | 11821 | gatagttacc ggataaggcg cagcggtcgg gctgaacggg gggttcgtgc acacagccca | |
| | 11881 | gcttggagcg aacgacctac accgaactga gatacctaca gcgtgagcta tgagaaagcg | |
| | 11941 | ccacgcttcc cgaagggaga aaggcggaca ggtatccggt aagcggcagg gtcggaacag | |
| | 12001 | gagagcgcac gagggagctt ccagggggaa acgcctggta tctttatagt cctgtcgggt | |
| | 12061 | ttcgccacct ctgacttgag cgtcgatttt gttgatgctc gtcagggggg cggagcctat | |
| | 12121 | ggaaaaacgc cagcaacgcg gcctttttac ggttcctggc cttttgctgg ccttttgctc | |
| | 12181 | acatgttctt tcctgcgtta tcccctgatt ctgtggataa ccgtattacc gcctttgagt | |
| | 12241 | gagctgatac cgctcgccgc agccgaacga ccgagcgcag cgagtcagtg agcgaggaag | |
| | 12301 | cggaagagcg cctgatgcgg tattttctcc ttacgcatct gtgcggtatt tcacaccgca | |
| | 12361 | tatggtgcac tctcagtaca atctgctctg atgccgcata gttaagccag tatacactcc | |
| | 12421 | gctatcgcta cgtgactggg tcatggctgc gccccgacac ccgccaacac ccgctgacgc | |
| | 12481 | gccctgacgg gcttgtctgc tcccggcatc cgcttacaga caagctgtga ccgtctccgg | |
| | 12541 | gagctgcatg tgtcagaggt tttcaccgtc atcaccgaaa cgcgcgaggc agggtgcctt | |
| | 12601 | gatgtgggcg ccggcggtcg agtggcgacg gcgcggcttg tccgcgccct ggtagattgc | |
| | 12661 | ctggccgtag gccagccatt tttgagcggc cagcggccgc gataggccga cgcgaagcgg | |
| | 12721 | cggggcgtag ggagcgcagc gaccgaaggg taggcgcttt ttgcagctct tcggctgtgc | |
| | 12781 | gctggccaga cagttatgca caggccaggc gggttttaag agttttaata agttttaaag | |
| | 12841 | agttttaggc ggaaaaatcg ccttttttct cttttatatc agtcacttac atgtgtgacc | |
| | 12901 | ggttcccaat gtacggcttt gggttcccaa tgtacgggtt ccggttccca atgtacggct | |
| | 12961 | ttgggttccc aatgtacgtg ctatccacag gaaacagacc ttttcgacct ttttcccctg | |
| | 13021 | ctagggcaat ttgccctagc atctgctccg tacattagga accggcggat gcttcgccct | |
| | 13081 | cgatcaggtt gcggtagcgc atgactagga tcgggccagc ctgccccgcc tcctccttca | |
| | 13141 | aatcgtactc cggcaggtca tttgacccga tcagcttgcg cacggtgaaa cagaacttct | |
| | 13201 | tgaactctcc ggcgctgcca ctgcgttcgt agatcgtctt gaacaaccat ctggcttctg | |
| | 13261 | ccttgcctgc ggcgcggcgt gccaggcggt agagaaaacg gccgatgccg ggatcgatca | |
| | 13321 | aaaagtaatc ggggtgaacc gtcagcacgt ccgggttctt gccttctgtg atctcgcggt | |
| | 13381 | acatccaatc agctagctcg atctcgatgt actccggccg cccggtttcg ctctttacga | |
| | 13441 | tcttgtagcg gctaatcaag gcttcaccct cggataccgt caccaggcgg ccgttcttgg | |
| | 13501 | ccttcttcgt acgctgcatg gcaacgtgcg tggtgtttaa ccgaatgcag gtttctacca | |
| | 13561 | ggtcgtcttt ctgctttccg ccatcggctc gccggcagaa cttgagtacg tccgcaacgt | |
| | 13621 | gtggacggaa cacgcggccg ggcttgtctc ccttcccttc ccggtatcgg ttcatggatt | |
| | 13681 | cggttagatg ggaaaccgcc atcagtacca ggtcgtaatc ccacacactg gccatgccgg | |
| | 13741 | ccggccctgc ggaaacctct acgtgcccgt ctggaagctc gtagcggatc acctcgccag | |
| | 13801 | ctcgtcggtc acgcttcgac agacggaaaa cggccacgtc catgatgctg cgactatcgc | |
| | 13861 | gggtgcccac gtcatagagc atcggaacga aaaaatctgg ttgctcgtcg cccttgggcg | |
| | 13921 | gcttcctaat cgacggcgca ccggctgccg gcggttgccg ggattctttg cggattcgat | |
| | 13981 | cagcggccgc ttgccacgat tcaccggggc gtgcttctgc ctcgatgcgt tgccgctggg | |
| | 14041 | cggcctgcgc ggccttcaac ttctccacca ggtcatcacc cagcgccgcg ccgatttgta | |
| | 14101 | ccgggccgga tggtttgcga ccgctcacgc cgattcctcg ggcttggggg ttccagtgcc | |
| | 14161 | attgcagggc cggcagacaa cccagccgct tacgcctggc caaccgcccg ttcctccaca | |
| | 14221 | catggggcat tccacggcgt cggtgcctgg ttgttcttga ttttccatgc cgcctccttt | |
| | 14281 | agccgctaaa attcatctac tcatttattc atttgctcat ttactctggt agctgcgcga | |
| | 14341 | tgtattcaga tagcagctcg gtaatggtct tgccttggcg taccgcgtac atcttcagct | |
| | 14401 | tggtgtgatc ctccgccggc aactgaaagt tgacccgctt catggctggc gtgtctgcca | |
| | 14461 | ggctggccaa cgttgcagcc ttgctgctgc gtgcgctcgg acggccggca cttagcgtgt | |
| | 14521 | ttgtgctttt gctcattttc tctttacctc attaactcaa atgagttttg atttaatttc | |
| | 14581 | agcggccagc gcctggacct cgcgggcagc gtcgccctcg ggttctgatt caagaacggt | |
| | 14641 | tgtgccggcg gcggcagtgc ctgggtagct cacgcgctgc gtgatacggg actcaagaat | |
| | 14701 | gggcagctcg tacccggcca gcgcctcggc aacctcaccg ccgatgcgcg tgcctttgat | |
| | 14761 | cgcccgcgac acgacaaagg ccgcttgtag ccttccatcc gtgacctcaa tgcgctgctt | |
| | 14821 | aaccagctcc accaggtcgg cggtggccca tatgtcgtaa gggcttggct gcaccggaat | |
| | 14881 | cagcacgaag tcggctgcct tgatcgcgga cacagccaag tccgccgcct ggggcgctcc | |
| | 14941 | gtcgatcact acgaagtcgc gccggccgat ggccttcacg tcgcggtcaa tcgtcgggcg | |
| | 15001 | gtcgatgccg acaacggtta gcggttgatc ttcccgcacg gccgcccaat cgcgggcact | |
| | 15061 | gccctgggga tcggaatcga ctaacagaac atcggccccg gcgagttgca gggcgcgggc | |
| | 15121 | tagatgggtt gcgatggtcg tcttgcctga cccgcctttc tggttaagta cagcgataac | |
| | 15181 | cttcatgcgt tccccttgcg tatttgttta tttactcatc gcatcatata cgcagcgacc | |
| | 15241 | gcatgacgca agctgtttta ctcaaataca catcaccttt ttagacggcg gcgctcggtt | |
| | 15301 | tcttcagcgg ccaagctggc cggccaggcc gccagcttgg catcagacaa accggccagg | |
| | 15361 | atttcatgca gccgcacggt tgagacgtgc gcgggcggct cgaacacgta cccggccgcg | |
| | 15421 | atcatctccg cctcgatctc ttcggtaatg aaaaacggtt cgtcctggcc gtcctggtgc | |
| | 15481 | ggtttcatgc ttgttcctct tggcgttcat tctcggcggc cgccagggcg tcggcctcgg | |
| | 15541 | tcaatgcgtc ctcacggaag gcaccgcgcc gcctggcctc ggtgggcgtc acttcctcgc | |
| | 15601 | tgcgctcaag tgcgcggtac agggtcgagc gatgcacgcc aagcagtgca gccgcctctt | |
| | 15661 | tcacggtgcg gccttcctgg tcgatcagct cgcgggcgtg cgcgatctgt gccggggtga | |
| | 15721 | gggtagggcg ggggccaaac ttcacgcctc gggccttggc ggcctcgcgc ccgctccggg | |
| | 15781 | tgcggtcgat gattagggaa cgctcgaact cggcaatgcc ggcgaacacg gtcaacacca | |
| | 15841 | tgcggccggc cggcgtggtg gtgtcggccc acggctctgc caggctacgc aggcccgcgc | |
| | 15901 | cggcctcctg gatgcgctcg gcaatgtcca gtaggtcgcg ggtgctgcgg gccaggcggt | |
| | 15961 | ctagcctggt cactgtcaca acgtcgccag ggcgtaggtg gtcaagcatc ctggccagct | |
| | 16021 | ccgggcggtc gcgcctggtg ccggtgatct tctcggaaaa cagcttggtg cagccggccg | |
| | 16081 | cgtgcagttc ggcccgttgg ttggtcaagt cctggtcgtc ggtgctgacg cgggcatagc | |
| | 16141 | ccagcaggcc agcggcggcg ctcttgttca tggcgtaatg tctccggttc tagtcgcaag | |
| | 16201 | tattctactt tatgcgacta aaacacgcga caagaaaacg ccaggaaaag ggcagggcgg | |
| | 16261 | cagcctgtcg cgtaacttag gacttgtgcg acatgtcgtt ttcagaagac ggctgcactg | |
| | 16321 | aacgtcagaa gccgactgca ctatagcagc ggaggggttg gatcaaagta ctttgatccc | |
| | 16381 | gaggggaacc ctgtggttgg catgcacata caaatggacg aacggataaa ccttttcacg | |
| | 16441 | cccttttaaa tatccgttat tctaataaac gctcttttct cttag | |
| 33 | GTATGAAGAGAGGGAATGAT | | A gRNA cf |
| | | | phse401-basil- |
| | | | x4 CRISPR |
| | | | construct (SEQ |
| | | | ID NO: 37) to |
| | | | disrupt elf3 in |
| | | | basil. |
| 34 | GGCGTTGTTAGTCGGGTTTC | | A gRNA of |
| | | | phse401-basil- |
| | | | x4 CRISPR |
| | | | construct (SEQ |
| | | | ID NO: 37) to |
| | | | disrupt elf3 in |
| | | | basil. |
| 35 | GAATCGGTGAGTCTGTGGGA | | A gRNA of |
| | | | phse401-basil- |
| | | | x4 CRISPR |
| | | | construct (SEQ |
| | | | ID NO: 37) to |
| | | | disrupt elf3 in |
| | | | basil. |
| 36 | GACGGACGATTGAGACTAGA | | A gRNA of |
| | | | phse401-basil- |
| | | | x4 CRISPR |
| | | | construct (SEQ |
| | | | ID NO: 37) to |
| | | | disrupt elf3 in |
| | | | basil. |
| 37 | 1 | TAAACGCTCT TTTCTCTTAG GTTTACCCGC CAATATATCC TGTCAAACAC TGATAGTTTA | pHSE401_basil_ |
| | 61 | AACTGAAGGC GGGAAACGAC AATCTGATCC AAGCTCAAGC TGCTCTAGCA TTCGCCATTC | x4 |
| | 121 | AGGCTGCGCA ACTGTTGGGA AGGGCGATCG GTGCGGGCCT CTTCGCTATT ACGCCAGCTG | Plasmid |
| | 181 | GCGAAAGGGG GATGTGCTGC AAGGCGATTA AGTTGGGTAA CGCCAGGGTT TTCCCAGTCA | comprising |
| | 241 | CGACGTTGTA AAACGACGGC CAGTGCCAAG CTTCGACTTG CCTTCCGCAC AATACATCAT | CRISPR system |
| | 301 | TTCTTCTTAG CTTTTTTTCT TCTTCTTCGT TCATACAGTT TTTTTTTGTT TATCAGCTTA | to disrupt elf3 |
| | 361 | CATTTTCTTG AACCGTAGCT TTCGTTTTCT TCTTTTTAAC TTTCCATTCG GAGTTTTTGT | in basil. |
| | 421 | ATCTTGTTTC ATAGTTTGTC CCAGGATTAG AATGATTAGG CATCGAACCT TCAAGAATTT | |
| | 481 | GATTGAATAA AACATCTTCA TTCTTAAGAT ATGAAGATAA TCTTCAAAAG GCCCCTGGGA | |
| | 541 | ATCTGAAAGA AGAGAAGCAG GCCCATTTAT ATGGGAAAGA ACAATAGTAT TTCTTATATA | |
| | 601 | GGCCCATTTA AGTTGAAAAC AATCTTCAAA AGTCCCACAT CGCTTAGATA AGAAAACGAA | |
| | 661 | GCTGAGTTTA TATACAGCTA GAGTCGAAGT AGTGATTGTA TGAAGAGAGG GAATGATGTT | |
| | 721 | TTAGAGCTAG AAATAGCAAG TTAAAATAAG GCTAGTCCGT TATCAACTTG AAAAAGTGGC | |
| | 781 | ACCGAGTCGG TGCTTTTTTT TGCAAAATTT TCCAGATCGA TTTCTTCTTC CTCTGTTCTT | |
| | 841 | CGGCGTTCAA TTTCTGGGGT TTTCTCTTCG TTTTCTGTAA CTGAAACCTA AAATTTGACC | |
| | 901 | TAAAAAAAAT CTCAAATAAT ATGATTCAGT GGTTTTGTAC TTTTCAGTTA GTTGAGTTTT | |
| | 961 | GCAGTTCCGA TGAGATAAAC CAATATTAAT CCAAACTACT GCAGCCTGAC AGACAAATGA | |
| | 1021 | GGATGCAAAC AATTTTAAAG TTTATCTAAC GCTAGCTGTT TTGTTTCTTC TCTCTGGTGC | |
| | 1081 | ACCAACGACG GCGTTTTCTC AATCATAAAG AGGCTTGTTT TACTTAAGGC CAATAATGTT | |
| | 1141 | GATGGATCGA AAGAAGAGGG CTTTTAATAA ACGAGCCCGT TTAAGCTGTA AACGATGTCA | |
| | 1201 | AAAACATCCC ACATCGTTCA GTTGAAAATA GAAGCTCTGT TTATATATTG GTAGAGTCGA | |
| | 1261 | CTAAGAGATT GGCGTTGTTA GTCGGGTTTC GTTTTAGAGC TAGAAATAGC AAGTTAAAAT | |
| | 1321 | AAGGCTAGTC CGTTATCAAC TTGAAAAAGT GGCACCGAGT CGGTGCTTTT TTTGGATAGA | |
| | 1381 | ATTTCCCAGC TTTTTTGCGT GTTTCAGCTC TCATGATCCT TGGCCAATGG GTGTAGTAAA | |
| | 1441 | TTTTCTGCAC ATTCATTGGA TGGAAAATAA TGGTTTTAGC TTTAGGGAAT AAGAAAAGTG | |
| | 1501 | TATAGGAAGG GGATTTTTGT ACAATCACAT TTGAATTAGG TCTTTGAAAT GACAGGGAAT | |
| | 1561 | GAGGACATAT GATGAGACGG TCATTGTTTT AGTTCCACCA CGATTATATT TGAAATTTAC | |
| | 1621 | GTGAGTGTGA GTGAGACTTG CATAAGAAAA TAAAATCTTT AGTTGGGAAA AAATTCAATA | |
| | 1681 | ATATAAATGG GCTTGAGAAG GAAGCGAGGG ATAGGCCTTT TTCTAAAATA GGCCCATTTA | |
| | 1741 | AGCTATTAAC AATCTTCAAA AGTACCACAG CGCTTAGGTA AAGAAAGCAG CTGAGTTTAT | |
| | 1801 | ATATGGTTAG AGACGAAGTA GTGATTGAAT CGGTGAGTCT GTGGGAGTTT TAGAGCTAGA | |
| | 1861 | AATAGCAAGT TAAAATAAGG CTAGTCCGTT ATCAACTTGA AAAAGTGGCA CCGAGTCGGT | |
| | 1921 | GCTTTTTTTT GGCAAAAATT TTCAGATTTT TTCTTCATCT GTAGATTTCT GGGTTTTTTT | |
| | 1981 | TTCCGTTTCG TGAATCATAA GTGAAGTTTT GGATGCAAAT CTGCGCGAAA AAAGTTGGAC | |
| | 2041 | CTGCAATGAG CTTATTTAGA TAGCTAAGAC AAAGTGATTG GTCCGTTCGA CTTGCCTTCC | |
| | 2101 | GCACAATACA TCATTTCTTC TTAGCTTTTT TTCTTCTTCT TCGTTCATAC AGTTTTTTTT | |
| | 2161 | TGTTTATCAG CTTACATTTT CTTGAACCGT AGCTTTCGTT TTCTTCTTTT TAACTTTCCA | |
| | 2221 | TTCGGAGTTT TTGTATCTTG TTTCATAGTT TGTCCCAGGA TTAGAATGAT TAGGCATCGA | |
| | 2281 | ACCTTCAAGA ATTTGATTGA ATAAAACATC TTCATTCTTA AGATATGAAG ATAATCTTCA | |
| | 2341 | AAAGGCCCCT GGGAATCTGA AAGAAGAGAA GCAGGCCCAT TTATATGGGA AAGAACAATA | |
| | 2401 | GTATTTCTTA TATAGGCCCA TTTAAGTTGA AAACAATCTT CAAAAGTCCC ACATCGCTTA | |
| | 2461 | GATAAGAAAA CGAAGCTGAG TTTATATACA GCTAGAGTCG AAGTAGTGAT TGACGGACGA | |
| | 2521 | TTGAGACTAG AGTTTTAGAG CTAGAAATAG CAAGTTAAAA TAAGGCTAGT CCGTTATCAA | |
| | 2581 | CTTGAAAAAG TGGCACCGAG TCGGTGCTTT TTTTTGCAAA ATTTTCCAGA TCGATTTCTT | |
| | 2641 | CTTCCTCTGT TCTTCGGCGT TCAATTTCTG GGGTTTTCTC TTCGTTTTCT GTAACTGAAA | |
| | 2701 | CCTAAAATTT GACCTAAAAA AAATCTCAAA TAATATGATT CAGTGGTTTT GTACTTTTCA | |
| | 2761 | GTTAGTTGAG TTTTGCAGTT CCGATGAGAT AAACCAATAA GCTTGCATGC CTGCAGGTCA | |
| | 2821 | ACATGGTGGA GCACGACACA CTTGTCTACT CCAAAAATAT CAAAGATACA GTCTCAGAAG | |
| | 2881 | ACCAAAGGGC AATTGAGACT TTTCAACAAA GGGTAATATC CGGAAACCTC CTCGGATTCC | |
| | 2941 | ATTGCCCAGC TATCTGTCAC TTTATTGTGA AGATAGTGGA AAAGGAAGGT GGCTCCTACA | |
| | 3001 | AATGCCATCA TTGCGATAAA GGAAAGGCCA TCGTTGAAGA TGCCTCTGCC GACAGTGGTC | |
| | 3061 | CCAAAGATGG ACCCCCACCC ACGAGGAGCA TCGTGGAAAA AGAAGACGTT CCAACCACGT | |
| | 3121 | CTTCAAAGCA AGTGGATTGA TGTGATAACA TGGTGGAGCA CGACACACTT GTCTACTCCA | |
| | 3181 | AAAATATCAA AGATACAGTC TCAGAAGACC AAAGGGCAAT TGAGACTTTT CAACAAAGGG | |
| | 3241 | TAATATCCGG AAACCTCCTC GGATTCCATT GCCCAGCTAT CTGTCACTTT ATTGTGAAGA | |
| | 3301 | TAGTGGAAAA GGAAGGTGGC TCCTACAAAT GCCATCATTG CGATAAAGGA AAGGCCATCG | |
| | 3361 | TTGAAGATGC CTCTGCCGAC AGTGGTCCCA AAGATGGACC CCCACCCACG AGGAGCATCG | |
| | 3421 | TGGAAAAAGA AGACGTTCCA ACCACGTCTT CAAAGCAAGT GGATTGATGT GATATCTCCA | |
| | 3481 | CTGACGTAAG GGATGACGCA CAATCCCACT ATCCTTCGCA AGACCCTTCC TCTATATAAG | |
| | 3541 | GAAGTTCATT TCATTTGGAG AGGACCTCGA CCTCAACACA ACATATACAA AACAAACGAA | |
| | 3601 | TCTCAAGCAA TCAAGCATTC TACTTCTATT GCAGCAATTT AAATCATTTC TTTTAAAGCA | |
| | 3661 | AAAGCAATTT TCTGAAAATT TTCACCATTT ACGAACGATA CTCGAGTAAT CTAGATGGAT | |
| | 3721 | TACAAGGACC ACGACGGGGA TTACAAGGAC CACGACATTG ATTACAAGGA TGATGATGAC | |
| | 3781 | AAGATGGCTC CGAAGAAGAA GAGGAAGGTT GGCATCCACG GGGTGCCAGC TGCTGACAAG | |
| | 3841 | AAGTACTCGA TCGGCCTCGA TATTGGGACT AACTCTGTTG GCTGGGCCGT GATCACCGAC | |
| | 3901 | GAGTACAAGG TGCCCTCAAA GAAGTTCAAG GTCCTGGGCA ACACCGATCG GCATTCCATC | |
| | 3961 | AAGAAGAATC TCATTGGCGC TCTCCTGTTC GACAGCGGCG AGACGGCTGA GGCTACGCGG | |
| | 4021 | CTCAAGCGCA CCGCCCGCAG GCGGTACACG CGCAGGAAGA ATCGCATCTG CTACCTGCAG | |
| | 4081 | GAGATTTTCT CCAACGAGAT GGCGAAGGTT GACGATTCTT TCTTCCACAG GCTGGAGGAG | |
| | 4141 | TCATTCCTCG TGGAGGAGGA TAAGAAGCAC GAGCGGCATC CAATCTTCGG CAACATTGTC | |
| | 4201 | GACGAGGTTG CCTACCACGA GAAGTACCCT ACGATCTACC ATCTGCGGAA GAAGCTCGTG | |
| | 4261 | GACTCCACAG ATAAGGCGGA CCTCCGCCTG ATCTACCTCG CTCTGGCCCA CATGATTAAG | |
| | 4321 | TTCAGGGGCC ATTTCCTGAT CGAGGGGGAT CTCAACCCGG ACAATAGCGA TGTTGACAAG | |
| | 4381 | CTGTTCATCC AGCTCGTGCA GACGTACAAC CAGCTCTTCG AGGAGAACCC CATTAATGCG | |
| | 4441 | TCAGGCGTCG ACGCGAAGGC TATCCTGTCC GCTAGGCTCT CGAAGTCTCG GCGCCTCGAG | |
| | 4501 | AACCTGATCG CCCAGCTGCC GGGCGAGAAG AAGAACGGCC TGTTCGGGAA TCTCATTGCG | |
| | 4561 | CTCAGCCTGG GGCTCACGCC CAACTTCAAG TCGAATTTCG ATCTCGCTGA GGACGCCAAG | |
| | 4621 | CTGCAGCTCT CCAAGGACAC ATACGACGAT GACCTGGATA ACCTCCTGGC CCAGATCGGC | |
| | 4681 | GATCAGTACG CGGACCTGTT CCTCGCTGCC AAGAATCTGT CGGACGCCAT CCTCCTGTCT | |
| | 4741 | GATATTCTCA GGGTGAACAC CGAGATTACG AAGGCTCCGC TCTCAGCCTC CATGATCAAG | |
| | 4801 | CGCTACGACG AGCACCATCA GGATCTGACC CTCCTGAAGG CGCTGGTCAG GCAGCAGCTC | |
| | 4861 | CCCGAGAAGT ACAAGGAGAT CTTCTTCGAT CAGTCGAAGA ACGGCTACGC TGGGTACATT | |
| | 4921 | GACGGCGGGG CCTCTCAGGA GGAGTTCTAC AAGTTCATCA AGCCGATTCT GGAGAAGATG | |
| | 4981 | GACGGCACGG AGGAGCTGCT GGTGAAGCTC AATCGCGAGG ACCTCCTGAG GAAGCAGCGG | |
| | 5041 | ACATTCGATA ACGGCAGCAT CCCACACCAG ATTCATCTCG GGGAGCTGCA CGCTATCCTG | |
| | 5101 | AGGAGGCAGG AGGACTTCTA CCCTTTCCTC AAGGATAACC GCGAGAAGAT CGAGAAGATT | |
| | 5161 | CTGACTTTCA GGATCCCGTA CTACGTCGGC CCACTCGCTA GGGGCAACTC CCGCTTCGCT | |
| | 5221 | TGGATGACCC GCAAGTCAGA GGAGACGATC ACGCCGTGGA ACTTCGAGGA GGTGGTCGAC | |
| | 5281 | AAGGGCGCTA GCGCTCAGTC GTTCATCGAG AGGATGACGA ATTTCGACAA GAACCTGCCA | |
| | 5341 | AATGAGAAGG TGCTCCCTAA GCACTCGCTC CTGTACGAGT ACTTCACAGT CTACAACGAG | |
| | 5401 | CTGACTAAGG TGAAGTATGT GACCGAGGGC ATGAGGAAGC CGGCTTTCCT GTCTGGGGAG | |
| | 5461 | CAGAAGAAGG CCATCGTGGA CCTCCTGTTC AAGACCAACC GGAAGGTCAC GGTTAAGCAG | |
| | 5521 | CTCAAGGAGG ACTACTTCAA GAAGATTGAG TGCTTCGATT CGGTCGAGAT CTCTGGCGTT | |
| | 5581 | GAGGACCGCT TCAACGCCTC CCTGGGGACC TACCACGATC TCCTGAAGAT CATTAAGGAT | |
| | 5641 | AAGGACTTCC TGGACAACGA GGAGAATGAG GATATCCTCG AGGACATTGT GCTGACACTC | |
| | 5701 | ACTCTGTTCG AGGACCGGGA GATGATCGAG GAGCGCCTGA AGACTTACGC CCATCTCTTC | |
| | 5761 | GATGACAAGG TCATGAAGCA GCTCAAGAGG AGGAGGTACA CCGGCTGGGG GAGGCTGAGC | |
| | 5821 | AGGAAGCTCA TCAACGGCAT TCGGGACAAG CAGTCCGGGA AGACGATCCT CGACTTCCTG | |
| | 5881 | AAGAGCGATG GCTTCGCGAA CCGCAATTTC ATGCAGCTGA TTCACGATGA CAGCCTCACA | |
| | 5941 | TTCAAGGAGG ATATCCAGAA GGCTCAGGTG AGCGGCCAGG GGGACTCGCT GCACGAGCAT | |
| | 6001 | ATCGCGAACC TCGCTGGCTC GCCAGCTATC AAGAAGGGGA TTCTGCAGAC CGTGAAGGTT | |
| | 6061 | GTGGACGAGC TGGTGAAGGT CATGGGCAGG CACAAGCCTG AGAACATCGT CATTGAGATG | |
| | 6121 | GCCCGGGAGA ATCAGACCAC GCAGAAGGGC CAGAAGAACT CACGCGAGAG GATGAAGAGG | |
| | 6181 | ATCGAGGAGG GCATTAAGGA GCTGGGGTCC CAGATCCTCA AGGAGCACCC GGTGGAGAAC | |
| | 6241 | ACGCAGCTGC AGAATGAGAA GCTCTACCTG TACTACCTCC AGAATGGCCG CGATATGTAT | |
| | 6301 | GTGGACCAGG AGCTGGATAT TAACAGGCTC AGCGATTACG ACGTCGATCA TATCGTTCCA | |
| | 6361 | CAGTCATTCC TGAAGGATGA CTCCATTGAC AACAAGGTCC TCACCAGGTC GGACAAGAAC | |
| | 6421 | CGGGGCAAGT CTGATAATGT TCCTTCAGAG GAGGTCGTTA AGAAGATGAA GAACTACTGG | |
| | 6481 | CGCCAGCTCC TGAATGCCAA GCTGATCACG CAGCGGAAGT TCGATAACCT CACAAAGGCT | |
| | 6541 | GAGAGGGGCG GGCTCTCTGA GCTGGACAAG GCGGGCTTCA TCAAGAGGCA GCTGGTCGAG | |
| | 6601 | ACACGGCAGA TCACTAAGCA CGTTGCGCAG ATTCTCGACT CACGGATGAA CACTAAGTAC | |
| | 6661 | GATGAGAATG ACAAGCTGAT CCGCGAGGTG AAGGTCATCA CCCTGAAGTC AAAGCTCGTC | |
| | 6721 | TCCGACTTCA GGAAGGATTT CCAGTTCTAC AAGGTTCGGG AGATCAACAA TTACCACCAT | |
| | 6781 | GCCCATGACG CGTACCTGAA CGCGGTGGTC GGCACAGCTC TGATCAAGAA GTACCCAAAG | |
| | 6841 | CTCGAGAGCG AGTTCGTGTA CGGGGACTAC AAGGTTTACG ATGTGAGGAA GATGATCGCC | |
| | 6901 | AAGTCGGAGC AGGAGATTGG CAAGGCTACC GCCAAGTACT TCTTCTACTC TAACATTATG | |
| | 6961 | AATTTCTTCA AGACAGAGAT CACTCTGGCC AATGGCGAGA TCCGGAAGCG CCCCCTCATC | |
| | 7021 | GAGACGAACG GCGAGACGGG GGAGATCGTG TGGGACAAGG GCAGGGATTT CGCGACCGTC | |
| | 7081 | AGGAAGGTTC TCTCCATGCC ACAAGTGAAT ATCGTCAAGA AGACAGAGGT CCAGACTGGC | |
| | 7141 | GGGTTCTCTA AGGAGTCAAT TCTGCCTAAG CGGAACAGCG ACAAGCTCAT CGCCCGCAAG | |
| | 7201 | AAGGACTGGG ATCCGAAGAA GTACGGCGGG TTCGACAGCC CCACTGTGGC CTACTCGGTC | |
| | 7261 | CTGGTTGTGG CGAAGGTTGA GAAGGGCAAG TCCAAGAAGC TCAAGAGCGT GAAGGAGCTG | |
| | 7321 | CTGGGGATCA CGATTATGGA GCGCTCCAGC TTCGAGAAGA ACCCGATCGA TTTCCTGGAG | |
| | 7381 | GCGAAGGGCT ACAAGGAGGT GAAGAAGGAC CTGATCATTA AGCTCCCCAA GTACTCACTC | |
| | 7441 | TTCGAGCTGG AGAACGGCAG GAAGCGGATG CTGGCTTCCG CTGGCGAGCT GCAGAAGGGG | |
| | 7501 | AACGAGCTGG CTCTGCCGTC CAAGTATGTG AACTTCCTCT ACCTGGCCTC CCACTACGAG | |
| | 7561 | AAGCTCAAGG GCAGCCCCGA GGACAACGAG CAGAAGCAGC TGTTCGTCGA GCAGCACAAG | |
| | 7621 | CATTACCTCG ACGAGATCAT TGAGCAGATT TCCGAGTTCT CCAAGCGCGT GATCCTGGCC | |
| | 7681 | GACGCGAATC TGGATAAGGT CCTCTCCGCG TACAACAAGC ACCGCGACAA GCCAATCAGG | |
| | 7741 | GAGCAGGCTG AGAATATCAT TCATCTCTTC ACCCTGACGA ACCTCGGCGC CCCTGCTGCT | |
| | 7801 | TTCAAGTACT TCGACACAAC TATCGATCGC AAGAGGTACA CAAGCACTAA GGAGGTCCTG | |
| | 7861 | GACGCGACCC TCATCCACCA GTCGATTACC GGCCTCTACG AGACGCGCAT CGACCTGTCT | |
| | 7921 | CAGCTCGGGG GCGACAAGCG GCCAGCGGCG ACGAAGAAGG CGGGGCAGGC GAAGAAGAAG | |
| | 7981 | AAGTGAGCTC AGAGCTTTCG TTCGTATCAT CGGTTTCGAC AACGTTCGTC AAGTTCAATG | |
| | 8041 | CATCAGTTTC ATTGCGCACA CACCAGAATC CTACTGAGTT TGAGTATTAT GGCATTGGGA | |
| | 8101 | AAACTGTTTT TCTTGTACCA TTTGTTGTGC TTGTAATTTA CTGTGTTTTT TATTCGGTTT | |
| | 8161 | TCGCTATCGA ACTGTGAAAT GGAAATGGAT GGAGAAGAGT TAATGAATGA TATGGTCCTT | |
| | 8221 | TTGTTCATTC TCAAATTAAT ATTATTTGTT TTTTCTCTTA TTTGTTGTGT GTTGAATTTG | |
| | 8281 | AAATTATAAG AGATATGCAA ACATTTTGTT TTGAGTAAAA ATGTGTCAAA TCGTGGCCTC | |
| | 8341 | TAATGACCGA AGTTAATATG AGGAGTAAAA CACTTGTAGT TGTACCATTA TGCTTATTCA | |
| | 8401 | CTAGGCAACA AATATATTTT CAGACCTAGA AAAGCTGCAA ATGTTACTGA ATACAAGTAT | |
| | 8461 | GTCCTCTTGT GTTTTAGACA TTTATGAACT TTCCTTTATG TAATTTTCCA GAATCCTTGT | |
| | 8521 | CAGATTCTAA TCATTGCTTT ATAATTATAG TTATACTCAT GGATTTGTAG TTGAGTATGA | |
| | 8581 | AAATATTTTT TAATGCATTT TATGACTTGC CAATTGATTG ACAACGAATT CGTAATCATG | |
| | 8641 | TCATAGCTGT TTCCTGTGTG AAATTGTTAT CCGCTCACAA TTCCACACAA CATACGAGCC | |
| | 8701 | GGAAGCATAA AGTGTAAAGC CTGGGGTGCC TAATGAGTGA GCTAACTCAC ATTAATTGCG | |
| | 8761 | TTGCGCTCAC TGCCCGCTTT CCAGTCGGGA AACCTGTCGT GCCAGCTGCA TTAATGAATC | |
| | 8821 | GGCCAACGCG CGGGGAGAGG CGGTTTGCGT ATTGGCTAGA GCAGCTTGCC AACATGGTGG | |
| | 8881 | AGCACGACAC TCTCGTCTAC TCCAAGAATA TCAAAGATAC AGTCTCAGAA GACCAAAGGG | |
| | 8941 | CTATTGAGAC TTTTCAACAA AGGGTAATAT CGGGAAACCT CCTCGGATTC CATTGCCCAG | |
| | 9001 | CTATCTGTCA CTTCATCAAA AGGACAGTAG AAAAGGAAGG TGGCACCTAC AAATGCCATC | |
| | 9061 | ATTGCGATAA AGGAAAGGCT ATCGTTCAAG ATGCCTCTGC CGACAGTGGT CCCAAAGATG | |
| | 9121 | GACCCCCACC CACGAGGAGC ATCGTGGAAA AAGAAGACGT TCCAACCACG TCTTCAAAGC | |
| | 9181 | AAGTGGATTG ATGTGAACAT GGTGGAGCAC GACACTCTCG TCTACTCCAA GAATATCAAA | |
| | 9241 | GATACAGTCT CAGAAGACCA AAGGGCTATT GAGACTTTTC AACAAAGGGT AATATCGGGA | |
| | 9301 | AACCTCCTCG GATTCCATTG CCCAGCTATC TGTCACTTCA TCAAAAGGAC AGTAGAAAAG | |
| | 9361 | GAAGGTGGCA CCTACAAATG CCATCATTGC GATAAAGGAA AGGCTATCGT TCAAGATGCC | |
| | 9421 | TCTGCCGACA GTGGTCCCAA AGATGGACCC CCACCCACGA GGAGCATCGT GGAAAAAGAA | |
| | 9481 | GACGTTCCAA CCACGTCTTC AAAGCAAGTG GATTGATGTG ATATCTCCAC TGACGTAAGG | |
| | 9541 | GATGACGCAC AATCCCACTA TCCTTCGCAA GACCCTTCCT CTATATAAGG AAGTTCATTT | |
| | 9601 | CATTTGGAGA GGACACGCTG AAATCACCAG TCTCTCTCTA CAAATCTATC TCTCTCGAGC | |
| | 9661 | TTTCGCAGAT CCGGGGGGCA ATGAGATATG AAAAAGCCTG AACTCACCGC GACGTCTGTC | |
| | 9721 | GAGAAGTTTC TGATCGAAAA GTTCGACAGC GTCTCCGACC TGATGCAGCT CTCGGAGGGC | |
| | 9781 | GAAGAATCTC GTGCTTTCAG CTTCGATGTA GGAGGGCGTG GATATGTCCT GCGGGTAAAT | |
| | 9841 | AGCTGCGCCG ATGGTTTCTA CAAAGATCGT TATGTTTATC GGCACTTTGC ATCGGCCGCG | |
| | 9901 | CTCCCGATTC CGGAAGTGCT TGACATTGGG GAGTTTAGCG AGAGCCTGAC CTATTGCATC | |
| | 9961 | TCCCGCCGTT CACAGGGTGT CACGTTGCAA GACCTGCCTG AAACCGAACT GCCCGCTGTT | |
| | 10021 | CTACAACCGG TCGCGGAGGC TATGGATGCG ATCGCTGCGG CCGATCTTAG CCAGACGAGC | |
| | 10081 | GGGTTCGGCC CATTCGGACC GCAAGGAATC GGTCAATACA CTACATGGCG TGATTTCATA | |
| | 10141 | TGCGCGATTG CTGATCCCCA TGTGTATCAC TGGCAAACTG TGATGGACGA CACCGTCAGT | |
| | 10201 | GCGTCCGTCG CGCAGGCTCT CGATGAGCTG ATGCTTTGGG CCGAGGACTG CCCCGAAGTC | |
| | 10261 | CGGCACCTCG TGCACGCGGA TTTCGGCTCC AACAATGTCC TGACGGACAA TGGCCGCATA | |
| | 10321 | ACAGCGGTCA TTGACTGGAG CGAGGCGATG TTCGGGGATT CCCAATACGA GGTCGCCAAC | |
| | 10381 | ATCTTCTTCT GGAGGCCGTG GTTGGCTTGT ATGGAGCAGC AGACGCGCTA CTTCGAGCGG | |
| | 10441 | AGGCATCCGG AGCTTGCAGG ATCGCCACGA CTCCGGGCGT ATATGCTCCG CATTGGTCTT | |
| | 10501 | GACCAACTCT ATCAGAGCTT GGTTGACGGC AATTTCGATG ATGCAGCTTG GGCGCAGGGT | |
| | 10561 | CGATGCGACG CAATCGTCCG ATCCGGAGCC GGGACTGTCG GGCGTACACA AATCGCCCGC | |
| | 10621 | AGAAGCGCGG CCGTCTGGAC CGATGGCTGT GTAGAAGTAC TCGCCGATAG TGGAAACCGA | |
| | 10681 | CGCCCCAGCA CTCGTCCGAG GGCAAAGAAA TAGAGTAGAT GCCGACCGGG ATCTGTCGAT | |
| | 10741 | CGACAAGCTC GAGTTTCTCC ATAATAATGT GTGAGTAGTT CCCAGATAAG GGAATTAGGG | |
| | 10801 | TTCCTATAGG GTTTCGCTCA TGTGTTGAGC ATATAAGAAA CCCTTAGTAT GTATTTGTAT | |
| | 10861 | TTGTAAAATA CTTCTATCAA TAAAATTTCT AATTCCTAAA ACCAAAATCC AGTACTAAAA | |
| | 10921 | TCCAGATCCC CCGAATTAAT TCGGCGTTAA TTCAGTACAT TAAAAACGTC CGCAATGTGT | |
| | 10981 | TATTAAGTTG TCTAAGCGTC AATTTGTTTA CACCACAATA TATCCTGCCA CCAGCCAGCC | |
| | 11041 | AACAGCTCCC CGACCGGCAG CTCGGCACAA AATCACCACT CGATACAGGC AGCCCATCAG | |
| | 11101 | TCCGGGACGG CGTCAGCGGG AGAGCCGTTG TAAGGCGGCA GACTTTGCTC ATGTTACCGA | |
| | 11161 | TGCTATTCGG AAGAACGGCA ACTAAGCTGC CGGGTTTGAA ACACGGATGA TCTCGCGGAG | |
| | 11221 | GGTAGCATGT TGATTGTAAC GATGACAGAG CGTTGCTGCC TGTGATCACC GCGGTTTCAA | |
| | 11281 | AATCGGCTCC GTCGATACTA TGTTATACGC CAACTTTGAA AACAACTTTG AAAAAGCTGT | |
| | 11341 | TTTCTGGTAT TTAAGGTTTT AGAATGCAAG GAACAGTGAA TTGGAGTTCG TCTTGTTATA | |
| | 11401 | ATTAGCTTCT TGGGGTATCT TTAAATACTG TAGAAAAGAG GAAGGAAATA ATAAATGGCT | |
| | 11461 | AAAATGAGAA TATCACCGGA ATTGAAAAAA CTGATCGAAA AATACCGCTG CGTAAAAGAT | |
| | 11521 | ACGGAAGGAA TGTCTCCTGC TAAGGTATAT AAGCTGGTGG GAGAAAATGA AAACCTATAT | |
| | 11581 | TTAAAAATGA CGGACAGCCG GTATAAAGGG ACCACCTATG ATGTGGAACG GGAAAAGGAC | |
| | 11641 | ATGATGCTAT GGCTGGAAGG AAAGCTGCCT GTTCCAAAGG TCCTGCACTT TGAACGGCAT | |
| | 11701 | GATGGCTGGA GCAATCTGCT CATGAGTGAG GCCGATGGCG TCCTTTGCTC GGAAGAGTAT | |
| | 11761 | GAAGATGAAC AAAGCCCTGA AAAGATTATC GAGCTGTATG CGGAGTGCAT CAGGCTCTTT | |
| | 11821 | CACTCCATCG ACATATCGGA TTGTCCCTAT ACGAATAGCT TAGACAGCCG CTTAGCCGAA | |
| | 11881 | TTGGATTACT TACTGAATAA CGATCTGGCC GATGTGGATT GCGAAAACTG GGAAGAAGAC | |
| | 11941 | ACTCCATTTA AAGATCCGCG CGAGCTGTAT GATTTTTTAA AGACGGAAAA GCCCGAAGAG | |
| | 12001 | GAACTTGTCT TTTCCCACGG CGACCTGGGA GACAGCAACA TCTTTGTGAA AGATGGCAAA | |
| | 12061 | GTAAGTGGCT TTATTGATCT TGGGAGAAGC GGCAGGGCGG ACAAGTGGTA TGACATTGCC | |
| | 12121 | TTCTGCGTCC GGTCGATCAG GGAGGATATC GGGGAAGAAC AGTATGTCGA GCTATTTTTT | |
| | 12181 | GACTTACTGG GGATCAAGCC TGATTGGGAG AAAATAAAAT ATTATATTTT ACTGGATGAA | |
| | 12241 | TTGTTTTAGT ACCTAGAATG CATGACCAAA ATCCCTTAAC GTGAGTTTTC GTTCCACTGA | |
| | 12301 | GCGTCAGACC CCGTAGAAAA GATCAAAGGA TCTTCTTGAG ATCCTTTTTT TCTGCGCGTA | |
| | 12361 | ATCTGCTGCT TGCAAACAAA AAAACCACCG CTACCAGCGG TGGTTTGTTT GCCGGATCAA | |
| | 12421 | GAGCTACCAA CTCTTTTTCC GAAGGTAACT GGCTTCAGCA GAGCGCAGAT ACCAAATACT | |
| | 12481 | GTCCTTCTAG TGTAGCCGTA GTTAGGCCAC CACTTCAAGA ACTCTGTAGC ACCGCCTACA | |
| | 12541 | TACCTCGCTC TGCTAATCCT GTTACCAGTG GCTGCTGCCA GTGGCGATAA GTCGTGTCTT | |
| | 12601 | ACCGGGTTGG ACTCAAGACG ATAGTTACCG GATAAGGCGC AGCGGTCGGG CTGAACGGGG | |
| | 12661 | GGTTCGTGCA CACAGCCCAG CTTGGAGCGA ACGACCTACA CCGAACTGAG ATACCTACAG | |
| | 12721 | CGTGAGCTAT GAGAAAGCGC CACGCTTCCC GAAGGGAGAA AGGCGGACAG GTATCCGGTA | |
| | 12781 | AGCGGCAGGG TCGGAACAGG AGAGCGCACG AGGGAGCTTC CAGGGGGAAA CGCCTGGTAT | |
| | 12841 | CTTTATAGTC CTGTCGGGTT TCGCCACCTC TGACTTGAGC GTCGATTTTT GTGATGCTCG | |
| | 12901 | TCAGGGGGGC GGAGCCTATG GAAAAACGCC AGCAACGCGG CCTTTTTACG GTTCCTGGCC | |
| | 12961 | TTTTGCTGGC CTTTTGCTCA CATGTTCTTT CCTGCGTTAT CCCCTGATTC TGTGGATAAC | |
| | 13021 | CGTATTACCG CCTTTGAGTG AGCTGATACC GCTCGCCGCA GCCGAACGAC CGAGCGCAGC | |
| | 13081 | GAGTCAGTGA GCGAGGAAGC GGAAGAGCGC CTGATGCGGT ATTTTCTCCT TACGCATCTG | |
| | 13141 | TGCGGTATTT CACACCGCAT ATGGTGCACT CTCAGTACAA TCTGCTCTGA TGCCGCATAG | |
| | 13201 | TTAAGCCAGT ATACACTCCG CTATCGCTAC GTGACTGGGT CATGGCTGCG CCCCGACACC | |
| | 13261 | CGCCAACACC CGCTGACGCG CCCTGACGGG CTTGTCTGCT CCCGGCATCC GCTTACAGAC | |
| | 13321 | AAGCTGTGAC CGTCTCCGGG AGCTGCATGT GTCAGAGGTT TTCACCGTCA TCACCGAAAC | |
| | 13381 | GCGCGAGGCA GGGTGCCTTG ATGTGGGCGC CGGCGGTCGA GTGGCGACGG CGCGGCTTGT | |
| | 13441 | CCGCGCCCTG GTAGATTGCC TGGCCGTAGG CCAGCCATTT TTGAGCGGCC AGCGGCCGCG | |
| | 13501 | ATAGGCCGAC GCGAAGCGGC GGGGCGTAGG GAGCGCAGCG ACCGAAGGGT AGGCGCTTTT | |
| | 13561 | TGCAGCTCTT CGGCTGTGCG CTGGCCAGAC AGTTATGCAC AGGCCAGGCG GGTTTTAAGA | |
| | 13621 | GTTTTAATAA GTTTTAAAGA GTTTTAGGCG GAAAAATCGC CTTTTTTCTC TTTTATATCA | |
| | 13681 | GTCACTTACA TGTGTGACCG GTTCCCAATG TACGGCTTTG GGTTCCCAAT GTACGGGTTC | |
| | 13741 | CGGTTCCCAA TGTACGGCTT TGGGTTCCCA ATGTACGTGC TATCCACAGG AAACAGACCT | |
| | 13801 | TTTCGACCTT TTTCCCCTGC TAGGGCAATT TGCCCTAGCA TCTGCTCCGT ACATTAGGAA | |
| | 13861 | CCGGCGGATG CTTCGCCCTC GATCAGGTTG CGGTAGCGCA TGACTAGGAT CGGGCCAGCC | |
| | 13921 | TGCCCCGCCT CCTCCTTCAA ATCGTACTCC GGCAGGTCAT TTGACCCGAT CAGCTTGCGC | |
| | 13981 | ACGGTGAAAC AGAACTTCTT GAACTCTCCG GCGCTGCCAC TGCGTTCGTA GATCGTCTTG | |
| | 14041 | AACAACCATC TGGCTTCTGC CTTGCCTGCG GCGCGGCGTG CCAGGCGGTA GAGAAAACGG | |
| | 14101 | CCGATGCCGG GATCGATCAA AAAGTAATCG GGGTGAACCG TCAGCACGTC CGGGTTCTTG | |
| | 14161 | CCTTCTGTGA TCTCGCGGTA CATCCAATCA GCTAGCTCGA TCTCGATGTA CTCCGGCCGC | |
| | 14221 | CCGGTTTCGC TCTTTACGAT CTTGTAGCGG CTAATCAAGG CTTCACCCTC GGATACCGTC | |
| | 14281 | ACCAGGCGGC CGTTCTTGGC CTTCTTCGTA CGCTGCATGG CAACGTGCGT GGTGTTTAAC | |
| | 14341 | CGAATGCAGG TTTCTACCAG GTCGTCTTTC TGCTTTCCGC CATCGGCTCG CCGGCAGAAC | |
| | 14401 | TTGAGTACGT CCGCAACGTG TGGACGGAAC ACGCGGCCGG GCTTGTCTCC CTTCCCTTCC | |
| | 14461 | CGGTATCGGT TCATGGATTC GGTTAGATGG GAAACCGCCA TCAGTACCAG GTCGTAATCC | |
| | 14521 | CACACACTGG CCATGCCGGC CGGCCCTGCG GAAACCTCTA CGTGCCCGTC TGGAAGCTCG | |
| | 14581 | TAGCGGATCA CCTCGCCAGC TCGTCGGTCA CGCTTCGACA GACGGAAAAC GGCCACGTCC | |
| | 14641 | ATGATGCTGC GACTATCGCG GGTGCCCACG TCATAGAGCA TCGGAACGAA AAAATCTGGT | |
| | 14701 | TGCTCGTCGC CCTTGGGCGG CTTCCTAATC GACGGCGCAC CGGCTGCCGG CGGTTGCCGG | |
| | 14761 | GATTCTTTGC GGATTCGATC AGCGGCCGCT TGCCACGATT CACCGGGGCG TGCTTCTGCC | |
| | 14821 | TCGATGCGTT GCCGCTGGGC GGCCTGCGCG GCCTTCAACT TCTCCACCAG GTCATCACCC | |
| | 14881 | AGCGCCGCGC CGATTTGTAC CGGGCCGGAT GGTTTGCGAC CGCTCACGCC GATTCCTCGG | |
| | 14941 | GCTTGGGGGT TCCAGTGCCA TTGCAGGGCC GGCAGGCAAC CCAGCCGCTT ACGCCTGGCC | |
| | 15001 | AACCGCCCGT TCCTCCACAC ATGGGGCATT CCACGGCGTC GGTGCCTGGT TGTTCTTGAT | |
| | 15061 | TTTCCATGCC GCCTCCTTTA GCCGCTAAAA TTCATCTACT CATTTATTCA TTTGCTCATT | |
| | 15121 | TACTCTGGTA GCTGCGCGAT GTATTCAGAT AGCAGCTCGG TAATGGTCTT GCCTTGGCGT | |
| | 15181 | ACCGCGTACA TCTTCAGCTT GGTGTGATCC TCCGCCGGCA ACTGAAAGTT GACCCGCTTC | |
| | 15241 | ATGGCTGGCG TGTCTGCCAG GCTGGCCAAC GTTGCAGCCT TGCTGCTGCG TGCGCTCGGA | |
| | 15301 | CGGCCGGCAC TTAGCGTGTT TGTGCTTTTG CTCATTTTCT CTTTACCTCA TTAACTCAAA | |
| | 15361 | TGAGTTTTGA TTTAATTTCA GCGGCCAGCG CCTGGACCTC GCGGGCAGCG TCGCCCTCGG | |
| | 15421 | GTTCTGATTC AAGAACGGTT GTGCCGGCGG CGGCAGTGCC TGGGTAGCTC ACGCGCTGCG | |
| | 15481 | TGATACGGGA CTCAAGAATG GGCAGCTCGT ACCCGGCCAG CGCCTCGGCA ACCTCACCGC | |
| | 15541 | CGATGCGCGT GCCTTTGATC GCCCGCGACA CGACAAAGGC CGCTTGTAGC CTTCCATCCG | |
| | 15601 | TGACCTCAAT GCGCTGCTTA ACCAGCTCCA CCAGGTCGGC GGTGGCCCAT ATGTCGTAAG | |
| | 15661 | GGCTTGGCTG CACCGGAATC AGCACGAAGT CGGCTGCCTT GATCGCGGAC ACAGCCAAGT | |
| | 15721 | CCGCCGCCTG GGGCGCTCCG TCGATCACTA CGAAGTCGCG CCGGCCGATG GCCTTCACGT | |
| | 15781 | CGCGGTCAAT CGTCGGGCGG TCGATGCCGA CAACGGTTAG CGGTTGATCT TCCCGCACGG | |
| | 15841 | CCGCCCAATC GCGGGCACTG CCCTGGGGAT CGGAATCGAC TAACAGAACA TCGGCCCCGG | |
| | 15901 | CGAGTTGCAG GGCGCGGGCT AGATGGGTTG CGATGGTCGT CTTGCCTGAC CCGCCTTTCT | |
| | 15961 | GGTTAAGTAC AGCGATAACC TTCATGCGTT CCCCTTGCGT ATTTGTTTAT TTACTCATCG | |
| | 16021 | CATCATATAC GCAGCGACCG CATGACGCAA GCTGTTTTAC TCAAATACAC ATCACCTTTT | |
| | 16081 | TAGACGGCGG CGCTCGGTTT CTTCAGCGGC CAAGCTGGCC GGCCAGGCCG CCAGCTTGGC | |
| | 16141 | ATCAGACAAA CCGGCCAGGA TTTCATGCAG CCGCACGGTT GAGACGTGCG CGGGCGGCTC | |
| | 16201 | GAACACGTAC CCGGCCGCGA TCATCTCCGC CTCGATCTCT TCGGTAATGA AAAACGGTTC | |
| | 16261 | GTCCTGGCCG TCCTGGTGCG GTTTCATGCT TGTTCCTCTT GGCGTTCATT CTCGGCGGCC | |
| | 16321 | GCCAGGGCGT CGGCCTCGGT CAATGCGTCC TCACGGAAGG CACCGCGCCG CCTGGCCTCG | |
| | 16381 | GTGGGCGTCA CTTCCTCGCT GCGCTCAAGT GCGCGGTACA GGGTCGAGCG ATGCACGCCA | |
| | 16441 | AGCAGTGCAG CCGCCTCTTT CACGGTGCGG CCTTCCTGGT CGATCAGCTC GCGGGCGTGC | |
| | 16501 | GCGATCTGTG CCGGGGTGAG GGTAGGGCGG GGGCCAAACT TCACGCCTCG GGCCTTGGCG | |
| | 16561 | GCCTCGCGCC CGCTCCGGGT GCGGTCGATG ATTAGGGAAC GCTCGAACTC GGCAATGCCG | |
| | 16621 | GCGAACACGG TCAACACCAT GCGGCCGGCC GGCGTGGTGG TGTCGGCCCA CGGCTCTGCC | |
| | 16681 | AGGCTACGCA GGCCCGCGCC GGCCTCCTGG ATGCGCTCGG CAATGTCCAG TAGGTCGCGG | |
| | 16741 | GTGCTGCGGG CCAGGCGGTC TAGCCTGGTC ACTGTCACAA CGTCGCCAGG GCGTAGGTGG | |
| | 16801 | TCAAGCATCC TGGCCAGCTC CGGGCGGTCG CGCCTGGTGC CGGTGATCTT CTCGGAAAAC | |
| | 16861 | AGCTTGGTGC AGCCGGCCGC GTGCAGTTCG GCCCGTTGGT TGGTCAAGTC CTGGTCGTCG | |
| | 16921 | GTGCTGACGC GGGCATAGCC CAGCAGGCCA GCGGCGGCGC TCTTGTTCAT GGCGTAATGT | |
| | 16981 | CTCCGGTTCT AGTCGCAAGT ATTCTACTTT ATGCGACTAA AACACGCGAC AAGAAAACGC | |
| | 17041 | CAGGAAAAGG GCAGGGCGGC AGCCTGTCGC GTAACTTAGG ACTTGTGCGA CATGTCGTTT | |
| | 17101 | TCAGAAGACG GCTGCACTGA ACGTCAGAAG CCGACTGCAC TATAGCAGCG GAGGGGTTGG | |
| | 17161 | ATCAAAGTAC TTTGATCCCG AGGGGAACCC TGTGGTTGGC ATGCACATAC AAATGGACGA | |
| | 17221 | ACGGATAAAC CTTTTCACGC CCTTTTAAAT ATCCGATTAT TCTAA | |

### EXAMPLES

[0234] All patents and publications mentioned in the specification are indicative of the levels of those skilled in the art to which the present disclosure pertains. All patents and publications are herein incorporated by reference to the same extent as if each individual publication was specifically and individually indicated to be incorporated by reference.

[0235] The publications discussed throughout are provided solely for their disclosure before the filing date of the present application. Nothing herein is to be construed as an admission that the invention is not entitled to antedate such disclosure by virtue of prior invention.

[0236] The following examples are included to demonstrate the disclosure. It should be appreciated by those of skill in the art that the techniques disclosed in the following examples represent techniques discovered by the inventors to function well in the practice of the disclosure. Those of skill in the art should, however, in light of the present disclosure, appreciate that many changes could be made in the disclosure and still obtain a like or similar result without departing from the spirit and scope of the disclosure, therefore all matter set forth is to be interpreted as illustrative and not in a limiting sense.

### Example 1. Combination of YHB and Elf3 Alleles Restricts Photomorphogenesis and Flowering Variation in Response to Environmental Cues

[0237] Plants are very sensitive to their environment and respond to changes in light and temperature to optimize their growth unlike animals, they demonstrate developmental plasticity. Developmental plasticity is advantageous in natural conditions (where resources and environmental stresses vary across seasons and location) but is disadvantageous in modern crop monoculture where fertilizers, pesticides, irrigation, etc., can be provided. Climate change offers additional challenges, with more varied weather and increasing temperatures disrupting plant development. Importantly, flowering in many crops is dependent on day length and highly influenced by ambient temperatures. This is disruptive to farmers who can only harvest at defined times of the year.

[0238] One goal of modern breeding programs is to increase the uniformity of crops so that harvesting time is more predictable and quality is consistent. This is true for intensive, precision outdoor farming and Total Controlled Environment Agriculture (TCEA, or vertical farming). Candidate targets include genes encoding for photoreceptors and thermoreceptors (proteins responsive to light and/or temperature) and genes that disrupt the circadian clock (an endogenous molecular timekeeper that governs responses to environmental signals at different times of day). As the circadian system allows measurement of daylength, disruption of the clock should produce day-neutral plants that flower regardless of season.

[0239] Using the model plant Arabidopsis thaliana, two genetic traits were combined to limit plants' response to environmental signals, disruption of EARLY FLOWERING3 (ELF3) and the addition of the constitutively-active Y276H allele of the photoreceptor phytochromeB (which is referred to herein as YHB). Loss of ELF3 accelerates flowering, disrupts circadian rhythms and potentially impairs temperature signaling, but induces an etiolated phenotype (that produces poor yield). YHB also induces earlier flowering and provides a consistent light signal regardless of irradiance, reducing etiolation. However, the combination of these two alleles has yet to be exploited.

[0240] Crucially, the inventors show that the combination of these two alleles [YHB(elf3)] has advantages over each allele individually. YHB(elf3) plants are not etiolated and flower earlier (so are good candidates for vegetative crops in TCEA). YHB(elf3) plants have reduced cellular elongation response to increasing temperature, which will reduce listing in the field. YHB(elf3) plants also flower at the same time regardless of day length-suggesting that crops can be developed that will flower consistently regardless of differences in day length at varied latitudes or in the face of climate change increasing temperatures and disrupting weather patterns. Similar traits can be exploited in TCEA to limit energy costs incurred when growing plants under artificial lighting, for example, shifted lighting regimes can be used to avoid peak energy supply rates or grow multiple species under a single lighting condition. Many secondary metabolite pathways are regulated by the clock, therefore valuable product production could be increased by “locking” the oscillator into an “on” position.

[0241] Results. Loss-of-function and over-expression analysis suggest that phytochrome- and ELF3-signaling pathways are genetically separable, although multiple lines of evidence demonstrate a functional interaction between these signaling pathways. To further characterize this relationship, the YHB allele was transformed into an elf3-2 background (FIG. 3A). Importantly, YHB was sufficient to induce photomorphogenesis in PHYB::YHB(elf3) seedlings grown in constant darkness, with the degree of photomorphogenesis observed correlating with the expression level of YHB (FIGS. 3B and 7A). Similar data were obtained using independently transformed 35S::YHB (phyb-9 elf3-1) seedlings (phyb-9; loss of function allele of PHYB; SEQ ID NO: 9. Produces truncated protein comprising SEQ ID NO: 10). These data agree with previous work suggesting that ELF3 and phyB make additive contributions to photomorphogenesis.

[0242] Seedling hypocotyl growth is exquisitely sensitive to light and temperature. As YHB (elf3-2) seedlings retained a constitutively photomorphogenetic (cop) phenotype when grown in constant darkness (FIGS. 3B-C) it was tested whether these seedlings were able to regulate their development in response to environmental factors, including daylength and temperature. Hypocotyl growth is negatively correlated with photoperiod in wild-type seedlings (FIG. 3C). Consistent with data gathered from etiolated seedlings (FIGS. 3B-3C), YHB (elf3) hypocotyls were not significantly extended in either long-day or short-day conditions (FIG. 3C). These data suggest that YHB (elf3) seedlings are not able to adjust their development in response to varied light conditions.

[0243] Phytochromes and ELF3 have both been reported to serve as integrators of temperature signals, and therefore, how YHB (elf3) seedling growth was affected by growth in different ambient temperatures was examined (FIG. 3D). elf3-2 responded in a similar fashion to wild type in the conditions used herein, while YHB seedlings failed to demonstrate hypocotyl extension when grown at 27° C., in line with previous reports (FIG. 3D). However, it was noted that the hypocotyls of YHB (elf3) seedlings were unresponsive to temperature (FIG. 3D). These data demonstrate that constitutively active phyB is sufficient to limit heat-induced hypocotyl elongation even in the absence of ELF3.

[0244] Next, the adult phenotypes of the YHB (elf3) plants (FIGS. 3E and 3F) were assessed. Following growth in short day conditions YHB (elf3) lines had a compact rosette comparable to YHB (FIG. 3E), demonstrating that ELF3 is not necessary for phyB-mediated changes in adult morphology (as in seedlings; FIGS. 3B-3D). In addition, the developmental time to flowering in short days was greatly accelerated in YHB, elf3-2, and YHB (elf3) plants despite the differences in rosette morphology observed (FIGS. 3E-3F). In long days (16:8), flowering time was accelerated in elf3-2 seedlings compared to wild type, although no differences in flowering time were observed between elf3-2 and YHB(elf3) plants (FIG. 3F).

[0245] Importantly, constitutively expressed YHB (elf3) plants also showed strongly reduced plant elongation responses to daylength (FIG. 4A) and temperature (FIG. 4B). Further, YHB (elf3) plants lacked circadian rhythms, flattening internal metabolic cycles under constant conditions either when expressed from its own promoter (FIG. 5A) or when constitutively expressed (FIG. 5B).

[0246] Discussion Plants are remarkably sensitive to environmental signals, adapting their growth and development to optimize survival and fecundity in the prevailing conditions. The flexibility of plant development greatly promotes survival in natural conditions but is sub-optimal for commercial farming where growth and harvesting schedules must be adjusted to match crop progression. It was sought to limit plants' inherent developmental plasticity by manipulating the PHYTOCHROMEB (PHYB) and EARLY FLOWERING3 (ELF3) loci within the Arabidopsis genome. It was demonstrated that these plants are unresponsive to environmental stimuli yet retain beneficial agronomic phenotypes that are lost in other manipulations.

### Example 2. Combination of YHB and Elf3 Alleles Restricts Photomorphogenesis and Flowering Variation in Response to Environmental Cues

[0247] A pennycress YHB (elf3) double mutant was also generated. The response of the double mutant plants to light and temperature and presence of absence of circadian rhythms is investigated. Pennycress YHB (elf3) double mutants show strongly reduce plant elongation responses to daylength and temperature. Further, YHB (elf3) pennycress lack circadian rhythms, flattening internal metabolic cycles.

### Example 3. Characterization of Plasticity of YHB Elf3 Plants

[0248] Plants demonstrate developmental plasticity which enables adaptation to prevailing environmental cues. Although valuable to maximize survival in nature, developmental plasticity restricts modern agricultural practices since economically important traits including vegetative growth and flowering time vary dependent upon local environmental conditions, preventing accurate prediction of harvesting times. In this study, it was sought to restrict developmental plasticity through manipulation of two signaling systems that govern these responses. Constitutive activation of the plant photoreceptor phyB, along with disruption of the circadian system created plants that are less responsive to environmental signals, enabling the creation of crops with uniform flowering time and productivity. This has significant implications for future agriculture in both open fields and controlled environments.

[0249] It was first hypothesized that developmental plasticity in plants could be restricted by disrupting signaling pathways that modulate plant development in response to environmental signals. Plants respond to light and temperature signals differentially dependent upon time of day, utilizing photo- and thermo-sensors in combination with the circadian system which provides an internal timing reference to relative to dawn and dusk. A suite of photoreceptors including phytochromes, cryptochromes, zeitlupe (ZTL), and UVR8 each integrate light signals into the circadian clock. Photoreceptors integrate with the circadian system at multiple levels, with phytochromes physically interacting with EARLY FLOWERING3 (ELF3), a gene which is essential to maintain circadian rhythms in constant light. Both phyB and ELF3 have been shown to be responsive to temperature in addition to their roles in photoperception and the circadian system. Accordingly, an aim of this study was to determine whether manipulation of these two proteins could and would be sufficient to restrict developmental plasticity.

### Phytochrome Drives Circadian Rhythms Via EARLY FLOWERING3

[0250] Loss-of-function and over-expression analysis suggest that phytochrome- and ELF3-signaling pathways are genetically separable, although multiple lines of evidence demonstrate a functional interaction between these signaling pathways. To further characterize this relationship a PHYB promoter driven YHB allele of PhyB was transformed into an elf3-2 background or a constitutively expressed YHB (35S::YHB) was transformed into an elf3-1 phyb-9 mutant background (FIG. 3-5) Since phyB and ELF3 physically interact, it was tested whether ELF3 is necessary for phyB signaling into the circadian system (FIG. 5A-5B). Neither PHYB::YHB (elf3-2) nor 35S::YHB (elf3-1 phyb-9) lines were able to maintain circadian rhythms of CCA1-driven bioluminescence in constant darkness, with only 15% of YHB elf3-2 lines being assessed as rhythmic (FIG. 5A-5B). Subsequent qRT-PCR analysis was consistent with the bioluminescence data, with both CCA1 and its orthologue LATE ELONGATED HYPOCOTYL (LHY) being damped in YHBelf3 seedlings compared to YHB plants (FIGS. 6G-6H). By contrast, it was noted that clock genes expressed later in the day, including GIGANTEA and PRR9, were elevated in elf3 and YHBelf3 lines compared to wild-type and YHB controls (FIGS. 6E-6F). Despite the interaction between phyB and ELF3, not all genomic regions occupied by phyB are also bound by ELF3 (FIG. 8A-B and Table 1). In contrast to CCA1 and LHY (which are bound by phyB only), GIGANTEA and PRR9 are bound by both phyB and ELF3 (FIG. 8B). This data suggest that the role of ELF3 as a transcriptional repressor is epistatic to phyB function in these cases (FIGS. 6E-F and FIGS. 8A-B and Table 1).

TABLE 1
Genes bound by;

| PHYB | ELF3 | PHYB and ELF3 |
|---|---|---|
| CCA1 | ELF3 | PRR9 |
| LHY | | PRR7 |
| RVE6 | | GI |
| PRR5 | | LNK1 |
| TOC1 | | |
| TCP21 | | |
| LUX | | |
| ELF4 | | |
| LNK2 | | |
| TIC | | |

[0251] The luciferase and bioluminescence data suggest that the clock becomes arrhythmic in constant darkness in YHBelf3 lines (FIGS. 5A-B, 6E-H and FIGS. 7C-D). This observed difference in expression after loss of rhythmicity was further assessed in all 29 core circadian clock genes using RNA sequencing (RNAseq; FIGS. 6A-B). To this end, plants were sampled after 48 hours of dark exposure at respective dusk (ZT60), a point at which wild type seedlings were assumed to have become arrhythmic and would therefore have relatively stable levels of circadian-controlled transcript abundance. Transcript abundance in wild type seedlings was used as a baseline to assess differential expression of core circadian clock genes in YHB, YHB(elf3-2) and elf3-2 seedlings. Fold change abundance of each gene was presented as a heat map (FIG. 6A) showing that more circadian genes are differentially expressed in YHB(elf3-2) seedlings than in YHB or elf3-2 seedlings, relative to wild type. The most highly differentially expressed genes (log 2FC>1.0 or <−1.0) are highlighted in FIG. 6A-B, showing that 11 of the 29 core clock genes are highly differentially expressed in YHB(elf3-2) relative to wild type, while only 7 genes are highly differentially expressed in elf3-2 and 5 in YHB. Of these highly differentially expressed genes, only ELF4 is highly differentially expressed in all three mutants. Additionally, the overexpression of ELF4 is stronger in YHB(elf3-2) than in YHB or elf3-2 (FIG. 6A). RVE4 and PRR5 are upregulated to a similar degree in both YHB and YHB(elf3-2) but not highly differentially expressed in elf3-2. GI, PRR9 and BOA are all highly upregulated and CCA1 and LHY are highly downregulated in both YHB(elf3-2) and elf3-2 but are not highly differentially expressed in YHB seedlings at ZT60 in the dark. Notably, RVE8 is highly upregulated in YHB and highly downregulated in elf3-2 but not highly differentially expressed in YHB(elf3-2) seedlings, suggesting that regulation of RVE8 by phyB and ELF3 acts via distinct, opposing mechanisms.

### ELF3 is not Required for YHB Plants to Initiate Photomorphogenesis in the Dark.

[0252] After observing that YHB seedlings require ELF3 to maintain circadian function under constant darkness, it was examined whether YHBelf3 seedlings retained the constitutively photomorphogenic phenotype of YHB seedlings. In 5 day old seedlings grown under constant darkness (FIG. 3B-C, 10A), YHB and YHB(elf3-2) plants exhibited significantly shorter hypocotyls (p<0.0005) and more uniform growth compared to wild type, whereas elf3-2 seedlings are significantly longer (p<0.0001). The average hypocotyl length of YHB(elf3-2) plants was comparable to YHB plants (p=0.2864), while the average hypocotyl length of elf3-2 mutants was significantly longer than all other genotypes (p<0.0001).

[0253] To further address how the effects of YHB and ELF3 influence photomorphogenesis, differential expression of photomorphogenesis associated genes was analyzed (list of 115 photomorphogenesis or photomorphogenesis associated genes was taken from TAIR a arabidopsis.org) in the RNAseq dataset obtained as described herein above of seedlings sampled at dusk after 48 hours of constant darkness. The fold change expression of the 36 photomorphogenesis associated genes which were highly differentially expressed (log 2FC>1.0 or <−1.0) in at least one mutant genotype relative to wild type is shown as a heatmap in FIG. 6C. The frequency of these genes being highly differentially expressed in YHB, YHB(elf3-2) and/or elf3-2 respectively is presented as a venn diagram in FIG. 6D, which showed that 4 genes in elf3-2 mutants experienced at least +/−1.0 log 2 fold change in transcript abundance relative to wild type, while YHB and YHB(elf3-2) mutants had a respective total of 22 or 25 highly differentially expressed genes. Of these genes, ASG4 and ATH1 are both highly upregulated in all three mutants, while HYH and STH are both highly upregulated in YHB and YHB(elf3-2) but highly downregulated in elf3-2. No other photomorphogenesis associated genes are highly differentially expressed in either YHB and elf3-2 or YHBelf3-2 and elf3-2, but 19 genes are co-differentially expressed in YHB and YHB(elf3-2). These data suggest that disruption of ELF3 has comparatively little effect upon YHB-regulated photomorphogenesis genes in contrast to the essential role for ELF3 in clock function.

### YHBelf3 Seedlings are Less Responsive to Varied Light and Temperature Conditions

[0254] Since the YHBelf3 seedlings lack circadian rhythms yet demonstrate constitutive photomorphogenesis, how these plants responded to daily patterns of environmental change was of interest (FIGS. 9, 10, 11). Each of the genotypes retained daily patterns of CCA1::LUC2 bioluminescence in driven light:dark cycles, with this rhythmicity lost in elf3-2 and YHBelf3 seedlings within 24 hours of transfer to constant white light (FIG. 9A). It was interesting to note that in contrast to previous reports under monochromatic red light, YHB seedlings had an extended circadian period under these conditions (FIG. 9A). A phase response curve was next completed to establish whether YHBelf3 lines were truly arhythmic in constant light (like elf3) or whether the lack of bioluminescence rhythms was masking an underlying oscillation (FIG. 11A). Seedlings were held in constant light for different periods of time and then released into constant darkness to assess the new phase imposed upon circadian the circadian system. In contrast to wild type and YHB seedlings, which demonstrated circadian control of CCA1::LUC phasing following the transfer into constant darkness, both elf3 and YHBelf3 seedlings displayed a linear response to the release into constant darkness (FIG. 11A). These data reiterate that ELF3 is essential for maintaining circadian rhythms in constant light, although daily rhythms are maintained in elf3 and YHBelf3 seedings in driven conditions.

[0255] Next, how YHBelf3 seedlings responded to varied light intensity during the photoperiod was examined (FIGS. 9B and 9C). In ‘square wave’ conditions, with lights either on or off, each of the genotypes was able to accurately anticipate dawn, with CCA1::LUC activity peaking at dawn in each case (FIG. 9B). In variable light conditions (FIG. 9C), all lines displayed a much weaker anticipation of dawn with peak CCA1-driven bioluminescence not being reached until hours after the onset of light. Under more varied lighting conditions, with low light at dawn being followed by an increase in fluence rate later in the day, it was found that elf3-2 and YHBelf3-2 seedlings demonstrated a peak in bioluminescence shortly after dawn, whereas wild-type and YHB seedlings peaked later in the morning (FIG. 9C). elf3-2 and YHB(elf3-2) mutants displayed peak CCA1-driven luciferase expression on the examined day at around 3 hours after dawn (27 hours after the start of imaging), before wild type and YHB lines which peaked at around 4 hours after dawn (28 hours after the start of imaging). These differences between ‘square wave’ and ‘varied’ light conditions likely represent the contribution of metabolic dawn to circadian timing.

[0256] Since phyB signaling is responsive to temperature it was next assessed whether the plant circadian system was differentially sensitive to light at different ambient temperatures (FIGS. 11B-11E, 12A-D). It was found that the circadian system was unresponsive to light at 12° C., although responses to fluence rate were retained at 17° C., 22° C., and 27° C. It was also interesting to note that the YHB circadian phenotype under constant white light was dependent upon both light and temperature; the extension of circadian period in YHB lines was only observed at higher fluence rates and temperatures (FIGS. 11B-11E, 12A-D). These data are consistent with YHB seedlings being less responsive to light and temperature.

### YHBelf3 Flower Early Regardless of Daylength

[0257] The combination of YHB and elf3 alleles decouples the circadian system from photomorphogenesis, although YHBelf3 plants retain reduced daily patterns of gene expression when grown in light:dark cycles (FIGS. 3B-F, 4A-B, 5A-b, 6A-H, 7C-D). It was therefore of interest how the genetic manipulations described herein affected developmental traits in varied environmental conditions (FIGS. 9A-C, 10A-H, 11B-E, 12A-D). As anticipated, YHBelf3 seedlings retained a short hypocotyl phenotype regardless of the light condition utilized for growth (FIG. 3B-D, 4A-B, 10A). Similarly, YHBelf3 hypocotyl growth was unaffected by temperature, with no significant difference in hypocotyl growth between 12 and 27° C. (FIG. 3D).

[0258] It was next examined how YHB and elf3 manipulations affected flowering time. YHB and elf3 plants flowered earlier than wild type in all conditions tested (under either long days or short days, as well as under elevated temperatures, FIGS. 3F, 10D, 10E). Differences in flowering time were especially apparent under short day conditions, where flowering was substantially delayed in wild-type plants. YHB plants flowered slightly later at 27° C. compared to 22° C. (FIG. 10E). YHBelf3 seedlings retained the early flowering phenotype of YHB and elf3 lines regardless of condition (FIGS. 3F, 10D, 10E). Despite these differences in flowering time, it was interesting to note that there was no difference in growth rate between genotypes in long-day conditions (FIG. 10G). In short-day conditions, YHBelf3 rosettes expand at a slower rate than the other genotypes (p<0.01, FIG. 10H), although wild type plants are not significantly bigger than the other genotypes until later in their lifecycle as they continue to grow due to the absence of flowering.

### Conclusions

[0259] The combination of YHB and elf3 alleles decouples the circadian system from plant photoperception and produces plants less responsive to environmental signals. YHBelf3 plants retain some molecular and developmental responses to light and temperature, although YHBelf3 plants retain consistently earlier flowering times without inhibiting vegetative growth.

### Example 4. Comparison of Plant Growth Responses

[0260] Wild-type pennycress is compared with elf3 gene mutant, YHB-transgene containing, and elf3 YHB transgenic pennycress lines for their growth in response to a variety of photoperiod conditions [e.g., short days (8 hours light/16 hours darkness), day-neutral (12 hours light/12 hours darkness), or long days (16 hours light/8 hours darkness) during juvenile and adult stages. The YHB and elf3 YHB transgenic pennycress lines show a reduced response to changing photoperiod conditions compared to the wild type, as it was demonstrated in Arabidopsis thaliana in the Examples herein above.

[0261] The above lines' growth responses to increased ambient temperature conditions (between 20-30 degrees Celsius) are also measured. The YHB and elf3 YHB transgenic pennycress lines also show a reduced elongation response to increases in temperature compared to wild type, as it was shown in Arabidopsis thaliana in the examples herein above. Combining the elf3 mutation with YHB shows reduced plasticity in growth to changing environment (light or temperature) conditions, producing a more uniform growth pattern regardless of day length or temperature.

### Example 5. Comparison of Plant Flowering Responses

[0262] Wild-type pennycress with elf3 gene mutant, YHB-transgene containing, and elf3 YHB transgenic pennycress lines are compared for their flowering in response to a variety of photoperiod conditions [e.g., short days (8 hours light/16 hours darkness), day-neutral (12 hours light/12 hours darkness), or long days (16 hours light/8 hours darkness). The elf3 mutant and elf3 YHB transgenic pennycress lines show a shorter time to flowering when compared to wild type or YHB transgenic lines, as it was shown in Arabidopsis thaliana in the examples herein above.

[0263] Time to flowering under increased ambient temperature (20-30 degrees Celsius) is also measured. As with above, the elf3 mutant and elf3 YHB transgenic pennycress lines show a reduced response to increasing temperature and flower at similar times regardless of temperature when compared to wild type, as it was shown in Arabidopsis thaliana in the examples herein above. Specifically combining the elf3 mutation with YHB shows reduced plasticity in flowering to changing environment (light or temperature) conditions, flowering at similar days after planting regardless of day length or temperature.

### Example 6. Comparison of Diurnal Metabolome

[0264] The clock arrhythmia produced by the elf3 mutation, combined with constant light signaling from the constitutive YHB transgene, reduces the daily oscillations in gene expression and the resulting proteins, decreasing the variation in the daily production of metabolites. The metabolomes of wild-type and elf3 YHB transgenic pennycress lines are measured over a 48-hour time course using mass spectrometry-based metabolome profiling. Daily rhythms of hundreds of metabolites in the elf3 YHB transgenic lines are flattened, with metabolites now clamped at constitutively high, intermediate, or low levels. The reduced dynamics of protein and metabolite production in the elf3 YHB transgenic lines makes it easier to predict and manipulate the production of high-value proteins or metabolites in plants.

The application's sequence listing, which the Patent Office published only in electronic form, follows.

SEQUENCE LISTING (37 sequences)

SEQ ID NO: 1 - DNA, 2088 bp, Arabidopsis thaliana
  source 1..2088: mol_type = genomic DNA
atgaagagagggaaagatgaggagaagatattggaacctatgtttcctcggcttcatgtgaatgatgcagataaaggagggcctagagctcctcctagaaacaagatggctctttatgagcagcttagtattccttctcagaggtttggtgatcatggaacgatgaattctcgtagtaacaacacaagcactttggttcatcctggaccatctagtcagccttgtggtgtggaaagaaacttatctgtccagcatcttgattcttcagccgcaaaccaagcaactgagaagtttgtctcccaaatgtccttcatggaaaatgtgagatcttcggcacagcatgatcagaggaaaatggtgagagaggaagaagattttgcagttccagtatatattaactcaagaagatctcagtctcatggcagaaccaagagtggtattgagaaggaaaaacacaccccaatggtggcacctagctctcatcactccattcgatttcaagaagtgaatcagacaggctcaaagcaaaacgtatgtttggctacttgttcaaaacctgaagttagggatcaggtcaaggcgaatgcaaggtcaggtggctttgtaatctctttagatgtatcagtcacagaggagattgatctcgaaaaatcagcatcaagtcatgatagagtaaatgattataatgcttccttgagacaagagtctagaaatcggttataccgagatggtggcaaaactcgtctgaaggacactgataatggagctgaatctcacttggcaacggaaaatcattcacaagagggtcatggcagtcctgaagacattgataatgatcgtgaatacagcaaaagcagagcatgcgcctctctgcagcagataaatgaagaggcaagtgatgacgtttctgatgattcgatggtggattctatatccagcatagatgtctctcccgatgatgttgtgggtatattaggtcaaaaacgtttctggagagcaaggaaagccattgccaatcaacaaagagtatttgctgttcaactatttgagttgcacagactgattaaggttcaaaaacttattgctgcatcaccggatctcttgctcgatgagatcagttttcttggaaaagtttctgctaaaagctatccagtgaagaagctccttccatcagaatttctggtaaagcctcctctaccacatgttgtcgtcaaacaaaggggtgactcggagaagactgaccaacataaaatggaaagctcagctgagaacgtagttgggaggttgtcaaatcaaggtcatcatcaacaatccaactacatgccttttgcaaacaacccaccggcttcaccggctccaaatggatattgctttcctcctcagcctcctccttcaggaaatcatcagcaatggttgatccctgtaatgtctccctcggaaggactgatatacaagcctcacccaggtatggcacacacggggcattatggaggatattatggtcattatatgcctacaccaatggtaatgcctcaatatcaccccggcatgggattcccacctcctggtaatggctacttccctccatatggaatgatgcccaccataatgaacccatattgttcaagccaacaacaacaacaacaacaacccaatgagcaaatgaaccagtttggacatcctggaaatcttcagaacacccaacaacaacaacagagatctgataatgaacctgctccacagcaacagcaacagccaacaaagtcttatccgcgagcaagaaagagcaggcaagggagcacaggaagcagtccaagtgggccacagggaatctctggtagcaagtcctttcggccattcgcagccgttgatgaggacagcaacatcaacaatgcacctgagcaaacgatgacaacaaccacaacgacgacaagaacaactgttactcagacaacaagagatgggggaggagtgacgagagtgataaaggtggtacctcacaacgcaaagctcgcgagtgagaatgctgccagaattttccagtcaatacaagaagaacgtaaacgctatgactcctctaagccttaa

SEQ ID NO: 2 - protein, 695 aa, Arabidopsis thaliana
MKRGKDEEKILEPMFPRLHVNDADKGGPRAPPRNKMALYEQLSIPSQRFGDHGTMNSRSNNTSTLVHPGPSSQPCGVERNLSVQHLDSSAANQATEKFVSQMSFMENVRSSAQHDQRKMVREEEDFAVPVYINSRRSQSHGRTKSGIEKEKHTPMVAPSSHHSIRFQEVNQTGSKQNVCLATCSKPEVRDQVKANARSGGFVISLDVSVTEEIDLEKSASSHDRVNDYNASLRQESRNRLYRDGGKTRLKDTDNGAESHLATENHSQEGHGSPEDIDNDREYSKSRACASLQQINEEASDDVSDDSMVDSISSIDVSPDDVVGILGQKRFWRARKAIANQQRVFAVQLFELHRLIKVQKLIAASPDLLLDEISFLGKVSAKSYPVKKLLPSEFLVKPPLPHVVVKQRGDSEKTDQHKMESSAENVVGRLSNQGHHQQSNYMPFANNPPASPAPNGYCFPPQPPPSGNHQQWLIPVMSPSEGLIYKPHPGMAHTGHYGGYYGHYMPTPMVMPQYHPGMGFPPPGNGYFPPYGMMPTIMNPYCSSQQQQQQQPNEQMNQFGHPGNLQNTQQQQQRSDNEPAPQQQQQPTKSYPRARKSRQGSTGSSPSGPQGISGSKSFRPFAAVDEDSNINNAPEQTMTTTTTTTRTTVTQTTRDGGGVTRVIKVVPHNAKLASENAARIFQSIQEERKRYDSSKP

SEQ ID NO: 3 - DNA, 2088 bp, Arabidopsis thaliana
  source 1..2088: mol_type = genomic DNA
atgaagagagggaaagatgaggagaagatattggaacctatgtttcctcggcttcatgtgaatgatgcagataaaggagggcctagagctcctcctagaaacaagatggctctttatgagcagcttagtattccttctcagaggtttggtgatcatggaacgatgaattctcgtagtaacaacacaagcactttggttcatcctggaccatctagtcagccttgtggtgtggaaagaaacttatctgtccagcatcttgattcttcagccgcaaaccaagcaactgagaagtttgtctcccaaatgtccttcatggaaaatgtgagatcttcggcacagcatgatcagaggaaaatggtgagagaggaagaagattttgcagttccagtatatattaactcaagaagatctcagtctcatggcagaaccaagagtggtattgagaaggaaaaacacaccccaatggtggcacctagctctcatcactccattcgatttcaagaagtgaatcagacaggctcaaagcaaaacgtatgtttggctacttgttcaaaacctgaagttagggatcaggtcaaggcgaatgcaaggtcaggtggctttgtaatctctttagatgtatcagtcacagaggagattgatctcgaaaaatcagcatcaagtcatgatagagtaaatgattataatgcttccttgagacaagagtctagaaatcggttataccgagatggtggcaaaactcgtctgaaggacactgataatggagctgaatctcacttggcaacggaaaatcattcacaagagggtcatggcagtcctgaagacattgataatgatcgtgaatacagcaaaagcagagcatgcgcctctctgcagcagataaatgaagaggcaagtgatgacgtttctgatgattcgatggtggattctatatccagcatagatgtctctcccgatgatgttgtgggtatattaggtcaaaaacgtttctggagagcaaggaaagccattgccaatcaacaaagagtatttgctgttcaactatttgagttgcacagactgattaaggttcaaaaacttattgctgcatcaccggatctcttgctcgatgagatcagttttcttggaaaagtttctgctaaaagctatccagtgaagaagctccttccatcagaatttctggtaaagcctcctctaccacatgttgtcgtcaaacaaaggggtgactcggagaagactgaccaacataaaatggaaagctcagctgagaacgtagttgggaggttgtcaaatcaaggtcatcatcaataatccaactacatgccttttgcaaacaacccaccggcttcaccggctccaaatggatattgctttcctcctcagcctcctccttcaggaaatcatcagcaatggttgatccctgtaatgtctccctcggaaggactgatatacaagcctcacccaggtatggcacacacggggcattatggaggatattatggtcattatatgcctacaccaatggtaatgcctcaatatcaccccggcatgggattcccacctcctggtaatggctacttccctccatatggaatgatgcccaccataatgaacccatattgttcaagccaacaacaacaacaacaacaacccaatgagcaaatgaaccagtttggacatcctggaaatcttcagaacacccaacaacaacaacagagatctgataatgaacctgctccacagcaacagcaacagccaacaaagtcttatccgcgagcaagaaagagcaggcaagggagcacaggaagcagtccaagtgggccacagggaatctctggtagcaagtcctttcggccattcgcagccgttgatgaggacagcaacatcaacaatgcacctgagcaaacgatgacaacaaccacaacgacgacaagaacaactgttactcagacaacaagagatgggggaggagtgacgagagtgataaaggtggtacctcacaacgcaaagctcgcgagtgagaatgctgccagaattttccagtcaatacaagaagaacgtaaacgctatgactcctctaagccttaa

SEQ ID NO: 4 - DNA, 1441 bp, Arabidopsis thaliana
  source 1..1441: mol_type = genomic DNA
atgaagagagggaaagatgaggagaagatattggaacctatgtttcctcggcttcatgtgaatgatgcagataaaggagggcctagagctcctcctagaaacaagatggctctttatgagcagcttagtattccttctcagaggtttggtgatcatggaacgatgaattctcgtagtaacaacacaagcactttggttcatcctggaccatctagtcagccttgtggtgtggaaagaaacttatctgtccagcatcttgattcttcagccgcaaaccaagcaactgagaagtttgtctcccaaatgtccttcatggaaaatgtgagatcttcggcacagcatgatcagaggaaaatggtgagagaggaagaagattttgcagttccagtatatattaactcaagaagatctcagtctcatggcagaaccaagagtggtattgagaaggaaaaacacaccccaatggtggcacctagctctcatcactccattcgatttcaagaagtgaatcagacaggctcaaagcaaaacgtatgtttggctacttgttcaaaacctgaagttagggatcaggtcaaggcgaatgcaaggtcaggtggctttgtaatctctttagatgtatcagtcacagaggagattgatctcgaaaaatcagcatcaagtcatgatagagtaaatgattataatgcttccttgagacaagagtctagaaatcggttataccgagatggtggcaaaactcgtctgaaggacactgataatggagctgaatctcacttggcaacggaaaatcattcacaagagggtcatggcagtcctgaagacattgataatgatcgtgaatacagcaaaagcagagcatgcgcctctctgcagcagataaatgaagaggcaagtgatgacgtttctgatgattcgatggtggattctatatccagcatagatgtctctcccgatgatgttgtgggtatattaggtcaaaaacgtttctggagagcaaggaaagccattgccaagtaagttcactagaaatttacagtttggttatttattctccgctctttctatttatctccttctttgataccaacattttttgcttgaaagaagttaatatttaagcattgttccgtagtcttactgaagctttttcctctgttgttttttgctattttcattgaggactgtggtagggcatatttcactatcaccaaatttcaaatttctagaacactctccttcatatttttttttcatgattaatgctgcaattgattgctgatatacatatatgactatttgtttcagctcgagaagaaacaaatactcatggaaacatatgagaaggtttctgaatgactttaccttaatcagtctggtgcaactcaaatagttgaacagcaaaatactctttggtgactggtaatggagaaacagagtc

SEQ ID NO: 5 - DNA, 3519 bp, Arabidopsis thaliana
  source 1..3519: mol_type = genomic DNA
atggtttccggagtcgggggtagtggcggtggccgtggcggtggccgtggcggagaagaagaaccgtcgtcaagtcacactcctaataaccgaagaggaggagaacaagctcaatcgtcgggaacgaaatctctcagaccaagaagcaacactgaatcaatgagcaaagcaattcaacagtacaccgtcgacgcaagactccacgccgttttcgaacaatccggcgaatcagggaaatcattcgactactcacaatcactcaaaacgacgacgtacggttcctctgtacctgagcaacagatcacagcttatctctctcgaatccagcgaggtggttacattcagcctttcggatgtatgatcgccgtcgatgaatccagtttccggatcatcggttacagtgaaaacgccagagaaatgttagggattatgcctcaatctgttcctactcttgagaaacctgagattctagctatgggaactgatgtgagatctttgttcacttcttcgagctcgattctactcgagcgtgctttcgttgctcgagagattaccttgttaaatccggtttggatccattccaagaatactggtaaaccgttttacgccattcttcataggattgatgttggtgttgttattgatttagagccagctagaactgaagatcctgcgctttctattgctggtgctgttcaatcgcagaaactcgcggttcgtgcgatttctcagttacaggctcttcctggtggagatattaagcttttgtgtgacactgtcgtggaaagtgtgagggacttgactggttatgatcgtgttatggtttataagtttcatgaagatgagcatggagaagttgtagctgagagtaaacgagatgatttagagccttatattggactgcattatcctgctactgatattcctcaagcgtcaaggttcttgtttaagcagaaccgtgtccgaatgatagtagattgcaatgccacacctgttcttgtggtccaggacgataggctaactcagtctatgtgcttggttggttctactcttagggctcctcatggttgtcactctcagtatatggctaacatgggatctattgcgtctttagcaatggcggttataatcaatggaaatgaagatgatgggagcaatgtagctagtggaagaagctcgatgaggctttggggtttggttgtttgccatcacacttcttctcgctgcataccgtttccgctaaggtatgcttgtgagtttttgatgcaggctttcggtttacagttaaacatggaattgcagttagctttgcaaatgtcagagaaacgcgttttgagaacgcagacactgttatgtgatatgcttctgcgtgactcgcctgctggaattgttacacagagtcccagtatcatggacttagtgaaatgtgacggtgcagcatttctttaccacgggaagtattacccgttgggtgttgctcctagtgaagttcagataaaagatgttgtggagtggttgcttgcgaatcatgcggattcaaccggattaagcactgatagtttaggcgatgcggggtatcccggtgcagctgcgttaggggatgctgtgtgcggtatggcagttgcatatatcacaaaaagagactttcttttttggtttcgatctcacactgcgaaagaaatcaaatggggaggcgctaagcatcatccggaggataaagatgatgggcaacgaatgcatcctcgttcgtcctttcaggcttttcttgaagttgttaagagccggagtcagccatgggaaactgcggaaatggatgcgattcactcgctccagcttattctgagagactcttttaaagaatctgaggcggctatgaactctaaagttgtggatggtgtggttcagccatgtagggatatggcgggggaacaggggattgatgagttaggtgcagttgcaagagagatggttaggctcattgagactgcaactgttcctatattcgctgtggatgccggaggctgcatcaatggatggaacgctaagattgcagagttgacaggtctctcagttgaagaagctatggggaagtctctggtttctgatttaatatacaaagagaatgaagcaactgtcaataagcttctttctcgtgctttgagaggggacgaggaaaagaatgtggaggttaagctgaaaactttcagccccgaactacaagggaaagcagtttttgtggttgtgaatgcttgttccagcaaggactacttgaacaacattgtcggcgtttgttttgttggacaagacgttactagtcagaaaatcgtaatggataagttcatcaacatacaaggagattacaaggctattgtacatagcccaaaccctctaatcccgccaatttttgctgctgacgagaacacgtgctgcctggaatggaacatggcgatggaaaagcttacgggttggtctcgcagtgaagtgattgggaaaatgattgtcggggaagtgtttgggagctgttgcatgctaaagggtcctgatgctttaaccaagttcatgattgtattgcataatgcgattggtggccaagatacggataagttccctttcccattctttgaccgcaatgggaagtttgttcaggctctattgactgcaaacaagcgggttagcctcgagggaaaggttattggggctttctgtttcttgcaaatcccgagccctgagctgcagcaagctttagcagtccaacggaggcaggacacagagtgtttcacgaaggcaaaagagttggcttatatttgtcaggtgataaagaatcctttgagcggtatgcgtttcgcaaactcattgttggaggccacagacttgaacgaggaccagaagcagttacttgaaacaagtgtttcttgcgagaaacagatctcaaggatcgtcggggacatggatcttgaaagcattgaagacggttcatttgtgctaaagagggaagagtttttccttggaagtgtcataaacgcgattgtaagtcaagcgatgttcttattaagggacagaggtcttcagctgatccgtgacattcccgaagagatcaaatcaatagaggtttttggagaccagataaggattcaacagctcctggctgagtttctgctgagtataatccggtatgcaccatctcaagagtgggtggagatccatttaagccaactttcaaagcaaatggctgatggattcgccgccatccgcacagaattcagaatggcgtgtccaggtgaaggtctgcctccagagctagtccgagacatgttccatagcagcaggtggacaagccctgaaggtttaggtctaagcgtatgtcgaaagattttaaagctaatgaacggtgaggttcaatacatccgagaatcagaacggtcctatttcctcatcattctggaactccctgtacctcgaaagcgaccattgtcaactgctagtggaagtggtgacatgatgctgatgatgccatattag

SEQ ID NO: 6 - protein, 1172 aa, Arabidopsis thaliana
MVSGVGGSGGGRGGGRGGEEEPSSSHTPNNRRGGEQAQSSGTKSLRPRSNTESMSKAIQQYTVDARLHAVFEQSGESGKSFDYSQSLKTTTYGSSVPEQQITAYLSRIQRGGYIQPFGCMIAVDESSFRIIGYSENAREMLGIMPQSVPTLEKPEILAMGTDVRSLFTSSSSILLERAFVAREITLLNPVWIHSKNTGKPFYAILHRIDVGVVIDLEPARTEDPALSIAGAVQSQKLAVRAISQLQALPGGDIKLLCDTVVESVRDLTGYDRVMVYKFHEDEHGEVVAESKRDDLEPYIGLHYPATDIPQASRFLFKQNRVRMIVDCNATPVLVVQDDRLTQSMCLVGSTLRAPHGCHSQYMANMGSIASLAMAVIINGNEDDGSNVASGRSSMRLWGLVVCHHTSSRCIPFPLRYACEFLMQAFGLQLNMELQLALQMSEKRVLRTQTLLCDMLLRDSPAGIVTQSPSIMDLVKCDGAAFLYHGKYYPLGVAPSEVQIKDVVEWLLANHADSTGLSTDSLGDAGYPGAAALGDAVCGMAVAYITKRDFLFWFRSHTAKEIKWGGAKHHPEDKDDGQRMHPRSSFQAFLEVVKSRSQPWETAEMDAIHSLQLILRDSFKESEAAMNSKVVDGVVQPCRDMAGEQGIDELGAVAREMVRLIETATVPIFAVDAGGCINGWNAKIAELTGLSVEEAMGKSLVSDLIYKENEATVNKLLSRALRGDEEKNVEVKLKTFSPELQGKAVFVVVNACSSKDYLNNIVGVCFVGQDVTSQKIVMDKFINIQGDYKAIVHSPNPLIPPIFAADENTCCLEWNMAMEKLTGWSRSEVIGKMIVGEVFGSCCMLKGPDALTKFMIVLHNAIGGQDTDKFPFPFFDRNGKFVQALLTANKRVSLEGKVIGAFCFLQIPSPELQQALAVQRRQDTECFTKAKELAYICQVIKNPLSGMRFANSLLEATDLNEDQKQLLETSVSCEKQISRIVGDMDLESIEDGSFVLKREEFFLGSVINAIVSQAMFLLRDRGLQLIRDIPEEIKSIEVFGDQIRIQQLLAEFLLSIIRYAPSQEWVEIHLSQLSKQMADGFAAIRTEFRMACPGEGLPPELVRDMFHSSRWTSPEGLGLSVCRKILKLMNGEVQYIRESERSYFLIILELPVPRKRPLSTASGSGDMMLMMPY

SEQ ID NO: 7 - DNA, 3519 bp, Arabidopsis thaliana
  source 1..3519: mol_type = genomic DNA
atggtttccggagtcgggggtagtggcggtggccgtggcggtggccgtggcggagaagaagaaccgtcgtcaagtcacactcctaataaccgaagaggaggagaacaagctcaatcgtcgggaacgaaatctctcagaccaagaagcaacactgaatcaatgagcaaagcaattcaacagtacaccgtcgacgcaagactccacgccgttttcgaacaatccggcgaatcagggaaatcattcgactactcacaatcactcaaaacgacgacgtacggttcctctgtacctgagcaacagatcacagcttatctctctcgaatccagcgaggtggttacattcagcctttcggatgtatgatcgccgtcgatgaatccagtttccggatcatcggttacagtgaaaacgccagagaaatgttagggattatgcctcaatctgttcctactcttgagaaacctgagattctagctatgggaactgatgtgagatctttgttcacttcttcgagctcgattctactcgagcgtgctttcgttgctcgagagattaccttgttaaatccggtttggatccattccaagaatactggtaaaccgttttacgccattcttcataggattgatgttggtgttgttattgatttagagccagctagaactgaagatcctgcgctttctattgctggtgctgttcaatcgcagaaactcgcggttcgtgcgatttctcagttacaggctcttcctggtggagatattaagcttttgtgtgacactgtcgtggaaagtgtgagggacttgactggttatgatcgtgttatggttcataagtttcatgaagatgagcatggagaagttgtagctgagagtaaacgagatgatttagagccttatattggactgcattatcctgctactgatattcctcaagcgtcaaggttcttgtttaagcagaaccgtgtccgaatgatagtagattgcaatgccacacctgttcttgtggtccaggacgataggctaactcagtctatgtgcttggttggttctactcttagggctcctcatggttgtcactctcagtatatggctaacatgggatctattgcgtctttagcaatggcggttataatcaatggaaatgaagatgatgggagcaatgtagctagtggaagaagctcgatgaggctttggggtttggttgtttgccatcacacttcttctcgctgcataccgtttccgctaaggtatgcttgtgagtttttgatgcaggctttcggtttacagttaaacatggaattgcagttagctttgcaaatgtcagagaaacgcgttttgagaacgcagacactgttatgtgatatgcttctgcgtgactcgcctgctggaattgttacacagagtcccagtatcatggacttagtgaaatgtgacggtgcagcatttctttaccacgggaagtattacccgttgggtgttgctcctagtgaagttcagataaaagatgttgtggagtggttgcttgcgaatcatgcggattcaaccggattaagcactgatagtttaggcgatgcggggtatcccggtgcagctgcgttaggggatgctgtgtgcggtatggcagttgcatatatcacaaaaagagactttcttttttggtttcgatctcacactgcgaaagaaatcaaatggggaggcgctaagcatcatccggaggataaagatgatgggcaacgaatgcatcctcgttcgtcctttcaggcttttcttgaagttgttaagagccggagtcagccatgggaaactgcggaaatggatgcgattcactcgctccagcttattctgagagactcttttaaagaatctgaggcggctatgaactctaaagttgtggatggtgtggttcagccatgtagggatatggcgggggaacaggggattgatgagttaggtgcagttgcaagagagatggttaggctcattgagactgcaactgttcctatattcgctgtggatgccggaggctgcatcaatggatggaacgctaagattgcagagttgacaggtctctcagttgaagaagctatggggaagtctctggtttctgatttaatatacaaagagaatgaagcaactgtcaataagcttctttctcgtgctttgagaggggacgaggaaaagaatgtggaggttaagctgaaaactttcagccccgaactacaagggaaagcagtttttgtggttgtgaatgcttgttccagcaaggactacttgaacaacattgtcggcgtttgttttgttggacaagacgttactagtcagaaaatcgtaatggataagttcatcaacatacaaggagattacaaggctattgtacatagcccaaaccctctaatcccgccaatttttgctgctgacgagaacacgtgctgcctggaatggaacatggcgatggaaaagcttacgggttggtctcgcagtgaagtgattgggaaaatgattgtcggggaagtgtttgggagctgttgcatgctaaagggtcctgatgctttaaccaagttcatgattgtattgcataatgcgattggtggccaagatacggataagttccctttcccattctttgaccgcaatgggaagtttgttcaggctctattgactgcaaacaagcgggttagcctcgagggaaaggttattggggctttctgtttcttgcaaatcccgagccctgagctgcagcaagctttagcagtccaacggaggcaggacacagagtgtttcacgaaggcaaaagagttggcttatatttgtcaggtgataaagaatcctttgagcggtatgcgtttcgcaaactcattgttggaggccacagacttgaacgaggaccagaagcagttacttgaaacaagtgtttcttgcgagaaacagatctcaaggatcgtcggggacatggatcttgaaagcattgaagacggttcatttgtgctaaagagggaagagtttttccttggaagtgtcataaacgcgattgtaagtcaagcgatgttcttattaagggacagaggtcttcagctgatccgtgacattcccgaagagatcaaatcaatagaggtttttggagaccagataaggattcaacagctcctggctgagtttctgctgagtataatccggtatgcaccatctcaagagtgggtggagatccatttaagccaactttcaaagcaaatggctgatggattcgccgccatccgcacagaattcagaatggcgtgtccaggtgaaggtctgcctccagagctagtccgagacatgttccatagcagcaggtggacaagccctgaaggtttaggtctaagcgtatgtcgaaagattttaaagctaatgaacggtgaggttcaatacatccgagaatcagaacggtcctatttcctcatcattctggaactccctgtacctcgaaagcgaccattgtcaactgctagtggaagtggtgacatgatgctgatgatgccatattag

SEQ ID NO: 8 - protein, 1172 aa, Arabidopsis thaliana
MVSGVGGSGGGRGGGRGGEEEPSSSHTPNNRRGGEQAQSSGTKSLRPRSNTESMSKAIQQYTVDARLHAVFEQSGESGKSFDYSQSLKTTTYGSSVPEQQITAYLSRIQRGGYIQPFGCMIAVDESSFRIIGYSENAREMLGIMPQSVPTLEKPEILAMGTDVRSLFTSSSSILLERAFVAREITLLNPVWIHSKNTGKPFYAILHRIDVGVVIDLEPARTEDPALSIAGAVQSQKLAVRAISQLQALPGGDIKLLCDTVVESVRDLTGYDRVMVHKFHEDEHGEVVAESKRDDLEPYIGLHYPATDIPQASRFLFKQNRVRMIVDCNATPVLVVQDDRLTQSMCLVGSTLRAPHGCHSQYMANMGSIASLAMAVIINGNEDDGSNVASGRSSMRLWGLVVCHHTSSRCIPFPLRYACEFLMQAFGLQLNMELQLALQMSEKRVLRTQTLLCDMLLRDSPAGIVTQSPSIMDLVKCDGAAFLYHGKYYPLGVAPSEVQIKDVVEWLLANHADSTGLSTDSLGDAGYPGAAALGDAVCGMAVAYITKRDFLFWFRSHTAKEIKWGGAKHHPEDKDDGQRMHPRSSFQAFLEVVKSRSQPWETAEMDAIHSLQLILRDSFKESEAAMNSKVVDGVVQPCRDMAGEQGIDELGAVAREMVRLIETATVPIFAVDAGGCINGWNAKIAELTGLSVEEAMGKSLVSDLIYKENEATVNKLLSRALRGDEEKNVEVKLKTFSPELQGKAVFVVVNACSSKDYLNNIVGVCFVGQDVTSQKIVMDKFINIQGDYKAIVHSPNPLIPPIFAADENTCCLEWNMAMEKLTGWSRSEVIGKMIVGEVFGSCCMLKGPDALTKFMIVLHNAIGGQDTDKFPFPFFDRNGKFVQALLTANKRVSLEGKVIGAFCFLQIPSPELQQALAVQRRQDTECFTKAKELAYICQVIKNPLSGMRFANSLLEATDLNEDQKQLLETSVSCEKQISRIVGDMDLESIEDGSFVLKREEFFLGSVINAIVSQAMFLLRDRGLQLIRDIPEEIKSIEVFGDQIRIQQLLAEFLLSIIRYAPSQEWVEIHLSQLSKQMADGFAAIRTEFRMACPGEGLPPELVRDMFHSSRWTSPEGLGLSVCRKILKLMNGEVQYIRESERSYFLIILELPVPRKRPLSTASGSGDMMLMMPY

SEQ ID NO: 9 - DNA, 3519 bp, Arabidopsis thaliana
  source 1..3519: mol_type = genomic DNA
atggtttccggagtcgggggtagtggcggtggccgtggcggtggccgtggcggagaagaagaaccgtcgtcaagtcacactcctaataaccgaagaggaggagaacaagctcaatcgtcgggaacgaaatctctcagaccaagaagcaacactgaatcaatgagcaaagcaattcaacagtacaccgtcgacgcaagactccacgccgttttcgaacaatccggcgaatcagggaaatcattcgactactcacaatcactcaaaacgacgacgtacggttcctctgtacctgagcaacagatcacagcttatctctctcgaatccagcgaggtggttacattcagcctttcggatgtatgatcgccgtcgatgaatccagtttccggatcatcggttatagtgaaaacgccagagaaatgttagggattatgcctcaatctgttcctactcttgagaaacctgagattctagctatgggaactgatgtgagatctttgttcacttcttcgagctcgattctactcgagcgtgctttcgttgctcgagagattaccttgttaaatccggtttggatccattccaagaatactggtaaaccgttttacgccattcttcataggattgatgttggtgttgttattgatttagagccagctagaactgaagatcctgcgctttctattgctggtgctgttcaatcgcagaaactcgcggttcgtgcgatttctcagttacaggctcttcctggtggagatattaagcttttgtgtgacactgtcgtggaaagtgtgagggacttgactggttatgatcgtgttatggtttataagtttcatgaagatgagcatggagaagttgtagctgagagtaaacgagatgatttagagccttatattggactgcattatcctgctactgatattcctcaagcgtcaaggttcttgtttaagcagaaccgtgtccgaatgatagtagattgcaatgccacacctgttcttgtggtccaggacgataggctaactcagtctatgtgcttggttggttctactcttagggctcctcatggttgtcactctcagtatatggctaacatgggatctattgcgtctttagcaatggcggttataatcaatggaaatgaagatgatgggagcaatgtagctagtggaagaagctcgatgaggctttgaggtttggttgtttgccatcacacttcttctcgctgcataccgtttccgctaaggtatgcttgtgagtttttgatgcaggctttcggtttacagttaaacatggaattgcagttagctttgcaaatgtcagagaaacgcgttttgagaacgcagacactgttatgtgatatgcttctgcgtgactcgcctgctggaattgttacacagagtcccagtatcatggacttagtgaaatgtgacggtgcagcatttctttaccacgggaagtattacccgttgggtgttgctcctagtgaagttcagataaaagatgttgtggagtggttgcttgcgaatcatgcggattcaaccggattaagcactgatagtttaggcgatgcggggtatcccggtgcagctgcgttaggggatgctgtgtgcggtatggcagttgcatatatcacaaaaagagactttcttttttggtttcgatctcacactgcgaaagaaatcaaatggggaggcgctaagcatcatccggaggataaagatgatgggcaacgaatgcatcctcgttcgtcctttcaggcttttcttgaagttgttaagagccggagtcagccatgggaaactgcggaaatggatgcgattcactcgctccagcttattctgagagactcttttaaagaatctgaggcggctatgaactctaaagttgtggatggtgtggttcagccatgtagggatatggcgggggaacaggggattgatgagttaggtgcagttgcaagagagatggttaggctcattgagactgcaactgttcctatattcgctgtggatgccggaggctgcatcaatggatggaacgctaagattgcagagttgacaggtctctcagttgaagaagctatggggaagtctctggtttctgatttaatatacaaagagaatgaagcaactgtcaataagcttctttctcgtgctttgagaggggacgaggaaaagaatgtggaggttaagctgaaaactttcagccccgaactacaagggaaagcagtttttgtggttgtgaatgcttgttccagcaaggactacttgaacaacattgtcggcgtttgttttgttggacaagacgttactagtcagaaaatcgtaatggataagttcatcaacatacaaggagattacaaggctattgtacatagcccaaaccctctaatcccgccaatttttgctgctgacgagaacacgtgctgcctggaatggaacatggcgatggaaaagcttacgggttggtctcgcagtgaagtgattgggaaaatgattgtcggggaagtgtttgggagctgttgcatgctaaagggtcctgatgctttaaccaagttcatgattgtattgcataatgcgattggtggccaagatacggataagttccctttcccattctttgaccgcaatgggaagtttgttcaggctctattgactgcaaacaagcgggttagcctcgagggaaaggttattggggctttctgtttcttgcaaatcccgagccctgagctgcagcaagctttagcagtccaacggaggcaggacacagagtgtttcacgaaggcaaaagagttggcttatatttgtcaggtgataaagaatcctttgagcggtatgcgtttcgcaaactcattgttggaggccacagacttgaacgaggaccagaagcagttacttgaaacaagtgtttcttgcgagaaacagatctcaaggatcgtcggggacatggatcttgaaagcattgaagacggttcatttgtgctaaagagggaagagtttttccttggaagtgtcataaacgcgattgtaagtcaagcgatgttcttattaagggacagaggtcttcagctgatccgtgacattcccgaagagatcaaatcaatagaggtttttggagaccagataaggattcaacagctcctggctgagtttctgctgagtataatccggtatgcaccatctcaagagtgggtggagatccatttaagccaactttcaaagcaaatggctgatggattcgccgccatccgcacagaattcagaatggcgtgtccaggtgaaggtctgcctccagagctagtccgagacatgttccatagcagcaggtggacaagccctgaaggtttaggtctaagcgtatgtcgaaagattttaaagctaatgaacggtgaggttcaatacatccgagaatcagaacggtcctatttcctcatcattctggaactccctgtacctcgaaagcgaccattgtcaactgctagtggaagtggtgacatgatgctgatgatgccatattag

SEQ ID NO: 10 - protein, 396 aa, Arabidopsis thaliana
MVSGVGGSGGGRGGGRGGEEEPSSSHTPNNRRGGEQAQSSGTKSLRPRSNTESMSKAIQQYTVDARLHAVFEQSGESGKSFDYSQSLKTTTYGSSVPEQQITAYLSRIQRGGYIQPFGCMIAVDESSFRIIGYSENAREMLGIMPQSVPTLEKPEILAMGTDVRSLFTSSSSILLERAFVAREITLLNPVWIHSKNTGKPFYAILHRIDVGVVIDLEPARTEDPALSIAGAVQSQKLAVRAISQLQALPGGDIKLLCDTVVESVRDLTGYDRVMVYKFHEDEHGEVVAESKRDDLEPYIGLHYPATDIPQASRFLFKQNRVRMIVDCNATPVLVVQDDRLTQSMCLVGSTLRAPHGCHSQYMANMGSIASLAMAVIINGNEDDGSNVASGRSSMRL

SEQ ID NO: 11 - DNA, 619344 bp, Arabidopsis thaliana
  source 1..619344: mol_type = genomic DNA
atggtttccggagtcgggggtagtggcggtggccgtggcggtggccgtggcggagaagaagaaccgtcgtcaagtcacactcctaataaccgaagaggaggagaacaagctcaatcgtcgggaacgaaatctctcagaccaagaagcaacactgaatcaatgagcaaagcaattcaacagtacaccgtcgacgcaagactccacgccgttttcgaacaatccggcgaatcagggaaatcattcgactactcacaatcactcaaaacgacgacgtacggttcctctgtacctgagcaacagatcacagcttatctctctcgaatccagcgaggtggttacattcagcctttcggatgtatgatcgccgtcgatgaatccagtttccggatcatcggttacagtgaaaacgccagagaaatgttagggattatgcctcaatctgttcctactcttgagaaacctgagattctagctatgggaactgatgtgagatctttgttcacttcttcgagctcgattctactcgagcgtgctttcgttgctcgagagattaccttgttaaatccggtttggatccattccaagaatactggtaaaccgttttacgccattcttcataggattgatgttggtgttgttattgatttagagccagctagaactgaagatcctgcgctttctattgctggtgctgttcaatcgcagaaactcgcggttcgtgcgatttctcagttacaggctcttcctggtggagatattaagcttttgtgtgacactgtcgtggaaagtgtgagggacttgactggttatgatcgtgttatggtttataagtttcatgaagatgagcatggagaagttgtagctgagagtaaacgagatgatttagagccttatattggactgcatgttcctgctactgatattcctcaagcgtcaaggttcttgtttaagcagaaccgtgtccgaatgatagtagattgcaatgccacacctgttcttgtggtccaggacgataggctaactcagtctatgtgcttggttggttctactcttagggctcctcatggttgtcactctcagtatatggctaacatgggatctattgcgtctttagcaatggcggttataatcaatggaaatgaagatgatgggagcaatgtagctagtggaagaagctcgatgaggctttggggtttggttgtttgccatcacacttcttctcgctgcataccgtttccgctaaggtatgcttgtgagtttttgatgcaggctttcggtttacagttaaacatggaattgcagttagctttgcaaatgtcagagaaacgcgttttgagaacgcagacactgttatgtgatatgcttctgcgtgactcgcctgctggaattgttacacagagtcccagtatcatggacttagtgaaatgtgacggtgcagcatttctttaccacgggaagtattacccgttgggtgttgctcctagtgaagttcagataaaagatgttgtggagtggttgcttgcgaatcatgcggattcaaccggattaagcactgatagtttaggcgatgcggggtatcccggtgcagctgcgttaggggatgctgtgtgcggtatggcagttgcatatatcacaaaaagagactttcttttttggtttcgatctcacactgcgaaagaaatcaaatggggaggcgctaagcatcatccggaggataaagatgatgggcaacgaatgcatcctcgttcgtcctttcaggcttttcttgaagttgttaagagccggagtcagccatgggaaactgcggaaatggatgcgattcactcgctccagcttattctgagagactcttttaaagaatctgaggcggctatgaactctaaagttgtggatggtgtggttcagccatgtagggatatggcgggggaacaggggattgatgagttaggtgcagttgcaagagagatggttaggctcattgagactgcaactgttcctatattcgctgtggatgccggaggctgcatcaatggatggaacgctaagattgcagagttgacaggtctctcagttgaagaagctatggggaagtctctggtttctgatttaatatacaaagagaatgaagcaactgtcaataagcttctttctcgtgctttgagaggggacgaggaaaagaatgtggaggttaagctgaaaactttcagccccgaactacaagggaaagcagtttttgtggttgtgaatgcttgttccagcaaggactacttgaacaacattgtcggcgtttgttttgttggacaagacgttactagtcagaaaatcgtaatggataagttcatcaacatacaaggagattacaaggctattgtacatagcccaaaccctctaatcccgccaatttttgctgctgacgagaacacgtgctgcctggaatggaacatggcgatggaaaagcttacgggttggtctcgcagtgaagtgattgggaaaatgattgtcggggaagtgtttgggagctgttgcatgctaaagggtcctgatgctttaaccaagttcatgattgtattgcataatgcgattggtggccaagatacggataagttccctttcccattctttgaccgcaatgggaagtttgttcaggctctattgactgcaaacaagcgggttagcctcgagggaaaggttattggggctttctgtttcttgcaaatcccgagccctgagctgcagcaagctttagcagtccaacggaggcaggacacagagtgtttcacgaaggcaaaagagttggcttatatttgtcaggtgataaagaatcctttgagcggtatgcgtttcgcaaactcattgttggaggccacagacttgaacgaggaccagaagcagttacttgaaacaagtgtttcttgcgagaaacagatctcaaggatcgtcggggacatggatcttgaaagcattgaagacggttcatttgtgctaaagagggaagagtttttccttggaagtgtcataaacgcgattgtaagtcaagcgatgttcttattaagggacagaggtcttcagctgatccgtgacattcccgaagagatcaaatcaatagaggtttttggagaccagataaggattcaacagctcctggctgagtttctgctgagtataatccggtatgcaccatctcaagagtgggtggagatccatttaagccaactttcaaagcaaatggctgatggattcgccgccatccgcacagaattcagaatggcgtgtccaggtgaaggtctgcctccagagctagtccgagacatgttccatagcagcaggtggacaagccctgaaggtttaggtctaagcgtatgtcgaaagattttaaagctaatgaacggtgaggttcaatacatccgagaatcagaacggtcctatttcctcatcattctggaactccctgtacctcgaaagcgaccattgtcaactgctagtggaagtggtgacatgatgctgatgatgccatattagatggtttccggagtcgggggtagtggcggtggccgtggcggtggccgtggcggagaagaagaaccgtcgtcaagtcacactcctaataaccgaagaggaggagaacaagctcaatcgtcgggaacgaaatctctcagaccaagaagcaacactgaatcaatgagcaaagcaattcaacagtacaccgtcgacgcaagactccacgccgttttcgaacaatccggcgaatcagggaaatcattcgactactcacaatcactcaaaacgacgacgtacggttcctctgtacctgagcaacagatcacagcttatctctctcgaatccagcgaggtggttacattcagcctttcggatgtatgatcgccgtcgatgaatccagtttccggatcatcggttacagtgaaaacgccagagaaatgttagggattatgcctcaatctgttcctactcttgagaaacctgagattctagctatgggaactgatgtgagatctttgttcacttcttcgagctcgattctactcgagcgtgctttcgttgctcgagagattaccttgttaaatccggtttggatccattccaagaatactggtaaaccgttttacgccattcttcataggattgatgttggtgttgttattgatttagagccagctagaactgaagatcctgcgctttctattgctggtgctgttcaatcgcagaaactcgcggttcgtgcgatttctcagttacaggctcttcctggtggagatattaagcttttgtgtgacactgtcgtggaaagtgtgagggacttgactggttatgatcgtgttatggtttataagtttcatgaagatgagcatggagaagttgtagctgagagtaaacgagatgatttagagccttatattggactgcatgttcctgctactgatattcctcaagcgtcaaggttcttgtttaagcagaaccgtgtccgaatgatagtagattgcaatgccacacctgttcttgtggtccaggacgataggctaactcagtctatgtgcttggttggttctactcttagggctcctcatggttgtcactctcagtatatggctaacatgggatctattgcgtctttagcaatggcggttataatcaatggaaatgaagatgatgggagcaatgtagctagtggaagaagctcgatgaggctttggggtttggttgtttgccatcacacttcttctcgctgcataccgtttccgctaaggtatgcttgtgagtttttgatgcaggctttcggtttacagttaaacatggaattgcagttagctttgcaaatgtcagagaaacgcgttttgagaacgcagacactgttatgtgatatgcttctgcgtgactcgcctgctggaattgttacacagagtcccagtatcatggacttagtgaaatgtgacggtgcagcatttctttaccacgggaagtattacccgttgggtgttgctcctagtgaagttcagataaaagatgttgtggagtggttgcttgcgaatcatgcggattcaaccggattaagcactgatagtttaggcgatgcggggtatcccggtgcagctgcgttaggggatgctgtgtgcggtatggcagttgcatatatcacaaaaagagactttcttttttggtttcgatctcacactgcgaaagaaatcaaatggggaggcgctaagcatcatccggaggataaagatgatgggcaacgaatgcatcctcgttcgtcctttcaggcttttcttgaagttgttaagagccggagtcagccatgggaaactgcggaaatggatgcgattcactcgctccagcttattctgagagactcttttaaagaatctgaggcggctatgaactctaaagttgtggatggtgtggttcagccatgtagggatatggcgggggaacaggggattgatgagttaggtgcagttgcaagagagatggttaggctcattgagactgcaactgttcctatattcgctgtggatgccggaggctgcatcaatggatggaacgctaagattgcagagttgacaggtctctcagttgaagaagctatggggaagtctctggtttctgatttaatatacaaagagaatgaagcaactgtcaataagcttctttctcgtgctttgagaggggacgaggaaaagaatgtggaggttaagctgaaaactttcagccccgaactacaagggaaagcagtttttgtggttgtgaatgcttgttccagcaaggactacttgaacaacattgtcggcgtttgttttgttggacaagacgttactagtcagaaaatcgtaatggataagttcatcaacatacaaggagattacaaggctattgtacatagcccaaaccctctaatcccgccaatttttgctgctgacgagaacacgtgctgcctggaatggaacatggcgatggaaaagcttacgggttggtctcgcagtgaagtgattgggaaaatgattgtcggggaagtgtttgggagctgttgcatgctaaagggtcctgatgctttaaccaagttcatgattgtattgcataatgcgattggtggccaagatacggataagttccctttcccattctttgaccgcaatgggaagtttgttcaggctctattgactgcaaacaagcgggttagcctcgagggaaaggttattggggctttctgtttcttgcaaatcccgagccctgagctgcagcaagctttagcagtccaacggaggcaggacacagagtgtttcacgaaggcaaaagagttggcttatatttgtcaggtgataaagaatcctttgagcggtatgcgtttcgcaaactcattgttggaggccacagacttgaacgaggaccagaagcagttacttgaaacaagtgtttcttgcgagaaacagatctcaaggatcgtcggggacatggatcttgaaagcattgaagacggttcatttgtgctaaagagggaagagtttttccttggaagtgtcataaacgcgattgtaagtcaagcgatgttcttattaagggacagaggtcttcagctgatccgtgacattcccgaagagatcaaatcaatagaggtttttggagaccagataaggattcaacagctcctggctgagtttctgctgagtataatccggtatgcaccatctcaagagtgggtggagatccatttaagccaactttcaaagcaaatggctgatggattcgccgccatccgcacagaattcagaatggcgtgtccaggtgaaggtctgcctccagagctagtccgagacatgttccatagcagcaggtggacaagccctgaaggtttaggtctaagcgtatgtcgaaagattttaaagctaatgaacggtgaggttcaatacatccgagaatcagaacggtcctatttcctcatcattctggaactccctgtacctcgaaagcgaccattgtcaactgctagtggaagtggtgacatgatgctgatgatgccatattagatggtttccggagtcgggggtagtggcggtggccgtggcggtggccgtggcggagaagaagaaccgtcgtcaagtcacactcctaataaccgaagaggaggagaacaagctcaatcgtcgggaacgaaatctctcagaccaagaagcaacactgaatcaatgagcaaagcaattcaacagtacaccgtcgacgcaagactccacgccgttttcgaacaatccggcgaatcagggaaatcattcgactactcacaatcactcaaaacgacgacgtacggttcctctgtacctgagcaacagatcacagcttatctctctcgaatccagcgaggtggttacattcagcctttcggatgtatgatcgccgtcgatgaatccagtttccggatcatcggttacagtgaaaacgccagagaaatgttagggattatgcctcaatctgttcctactcttgagaaacctgagattctagctatgggaactgatgtgagatctttgttcacttcttcgagctcgattctactcgagcgtgctttcgttgctcgagagattaccttgttaaatccggtttggatccattccaagaatactggtaaaccgttttacgccattcttcataggattgatgttggtgttgttattgatttagagccagctagaactgaagatcctgcgctttctattgctggtgctgttcaatcgcagaaactcgcggttcgtgcgatttctcagttacaggctcttcctggtggagatattaagcttttgtgtgacactgtcgtggaaagtgtgagggacttgactggttatgatcgtgttatggtttataagtttcatgaagatgagcatggagaagttgtagctgagagtaaacgagatgatttagagccttatattggactgcatgttcctgctactgatattcctcaagcgtcaaggttcttgtttaagcagaaccgtgtccgaatgatagtagattgcaatgccacacctgttcttgtggtccaggacgataggctaactcagtctatgtgcttggttggttctactcttagggctcctcatggttgtcactctcagtatatggctaacatgggatctattgcgtctttagcaatggcggttataatcaatggaaatgaagatgatgggagcaatgtagctagtggaagaagctcgatgaggctttggggtttggttgtttgccatcacacttcttctcgctgcataccgtttccgctaaggtatgcttgtgagtttttgatgcaggctttcggtttacagttaaacatggaattgcagttagctttgcaaatgtcagagaaacgcgttttgagaacgcagacactgttatgtgatatgcttctgcgtgactcgcctgctggaattgttacacagagtcccagtatcatggacttagtgaaatgtgacggtgcagcatttctttaccacgggaagtattacccgttgggtgttgctcctagtgaagttcagataaaagatgttgtggagtggttgcttgcgaatcatgcggattcaaccggattaagcactgatagtttaggcgatgcggggtatcccggtgcagctgcgttaggggatgctgtgtgcggtatggcagttgcatatatcacaaaaagagactttcttttttggtttcgatctcacactgcgaaagaaatcaaatggggaggcgctaagcatcatccggaggataaagatgatgggcaacgaatgcatcctcgttcgtcctttcaggcttttcttgaagttgttaagagccggagtcagccatgggaaactgcggaaatggatgcgattcactcgctccagcttattctgagagactcttttaaagaatctgaggcggctatgaactctaaagttgtggatggtgtggttcagccatgtagggatatggcgggggaacaggggattgatgagttaggtgcagttgcaagagagatggttaggctcattgagactgcaactgttcctatattcgctgtggatgccggaggctgcatcaatggatggaacgctaagattgcagagttgacaggtctctcagttgaagaagctatggggaagtctctggtttctgatttaatatacaaagagaatgaagcaactgtcaataagcttctttctcgtgctttgagaggggacgaggaaaagaatgtggaggttaagctgaaaactttcagccccgaactacaagggaaagcagtttttgtggttgtgaatgcttgttccagcaaggactacttgaacaacattgtcggcgtttgttttgttggacaagacgttactagtcagaaaatcgtaatggataagttcatcaacatacaaggagattacaaggctattgtacatagcccaaaccctctaatcccgccaatttttgctgctgacgagaacacgtgctgcctggaatggaacatggcgatggaaaagcttacgggttggtctcgcagtgaagtgattgggaaaatgattgtcggggaagtgtttgggagctgttgcatgctaaagggtcctgatgctttaaccaagttcatgattgtattgcataatgcgattggtggccaagatacggataagttccctttcccattctttgaccgcaatgggaagtttgttcaggctctattgactgcaaacaagcgggttagcctcgagggaaaggttattggggctttctgtttcttgcaaatcccgagccctgagctgcagcaagctttagcagtccaacggaggcaggacacagagtgtttcacgaaggcaaaagagttggcttatatttgtcaggtgataaagaatcctttgagcggtatgcgtttcgcaaactcattgttggaggccacagacttgaacgaggaccagaagcagttacttgaaacaagtgtttcttgcgagaaacagatctcaaggatcgtcggggacatggatcttgaaagcattgaagacggttcatttgtgctaaagagggaagagtttttccttggaagtgtcataaacgcgattgtaagtcaagcgatgttcttattaagggacagaggtcttcagctgatccgtgacattcccgaagagatcaaatcaatagaggtttttggagaccagataaggattcaacagctcctggctgagtttctgctgagtataatccggtatgcaccatctcaagagtgggtggagatccatttaagccaactttcaaagcaaatggctgatggattcgccgccatccgcacagaattcagaatggcgtgtccaggtgaaggtctgcctccagagctagtccgagacatgttccatagcagcaggtggacaagccctgaaggtttaggtctaagcgtatgtcgaaagattttaaagctaatgaacggtgaggttcaatacatccgagaatcagaacggtcctatttcctcatcattctggaactccctgtacctcgaaagcgaccattgtcaactgctagtggaagtggtgacatgatgctgatgatgccatattagatggtttccggagtcgggggtagtggcggtggccgtggcggtggccgtggcggagaagaagaaccgtcgtcaagtcacactcctaataaccgaagaggaggagaacaagctcaatcgtcgggaacgaaatctctcagaccaagaagcaacactgaatcaatgagcaaagcaattcaacagtacaccgtcgacgcaagactccacgccgttttcgaacaatccggcgaatcagggaaatcattcgactactcacaatcactcaaaacgacgacgtacggttcctctgtacctgagcaacagatcacagcttatctctctcgaatccagcgaggtggttacattcagcctttcggatgtatgatcgccgtcgatgaatccagtttccggatcatcggttacagtgaaaacgccagagaaatgttagggattatgcctcaatctgttcctactcttgagaaacctgagattctagctatgggaactgatgtgagatctttgttcacttcttcgagctcgattctactcgagcgtgctttcgttgctcgagagattaccttgttaaatccggtttggatccattccaagaatactggtaaaccgttttacgccattcttcataggattgatgttggtgttgttattgatttagagccagctagaactgaagatcctgcgctttctattgctggtgctgttcaatcgcagaaactcgcggttcgtgcgatttctcagttacaggctcttcctggtggagatattaagcttttgtgtgacactgtcgtggaaagtgtgagggacttgactggttatgatcgtgttatggtttataagtttcatgaagatgagcatggagaagttgtagctgagagtaaacgagatgatttagagccttatattggactgcatgttcctgctactgatattcctcaagcgtcaaggttcttgtttaagcagaaccgtgtccgaatgatagtagattgcaatgccacacctgttcttgtggtccaggacgataggctaactcagtctatgtgcttggttggttctactcttagggctcctcatggttgtcactctcagtatatggctaacatgggatctattgcgtctttagcaatggcggttataatcaatggaaatgaagatgatgggagcaatgtagctagtggaagaagctcgatgaggctttggggtttggttgtttgccatcacacttcttctcgctgcataccgtttccgctaaggtatgcttgtgagtttttgatgcaggctttcggtttacagttaaacatggaattgcagttagctttgcaaatgtcagagaaacgcgttttgagaacgcagacactgttatgtgatatgcttctgcgtgactcgcctgctggaattgttacacagagtcccagtatcatggacttagtgaaatgtgacggtgcagcatttctttaccacgggaagtattacccgttgggtgttgctcctagtgaagttcagataaaagatgttgtggagtggttgcttgcgaatcatgcggattcaaccggattaagcactgatagtttaggcgatgcggggtatcccggtgcagctgcgttaggggatgctgtgtgcggtatggcagttgcatatatcacaaaaagagactttcttttttggtttcgatctcacactgcgaaagaaatcaaatggggaggcgctaagcatcatccggaggataaagatgatgggcaacgaatgcatcctcgttcgtcctttcaggcttttcttgaagttgttaagagccggagtcagccatgggaaactgcggaaatggatgcgattcactcgctccagcttattctgagagactcttttaaagaatctgaggcggctatgaactctaaagttgtggatggtgtggttcagccatgtagggatatggcgggggaacaggggattgatgagttaggtgcagttgcaagagagatggttaggctcattgagactgcaactgttcctatattcgctgtggatgccggaggctgcatcaatggatggaacgctaagattgcagagttgacaggtctctcagttgaagaagctatggggaagtctctggtttctgatttaatatacaaagagaatgaagcaactgtcaataagcttctttctcgtgctttgagaggggacgaggaaaagaatgtggaggttaagctgaaaactttcagccccgaactacaagggaaagcagtttttgtggttgtgaatgcttgttccagcaaggactacttgaacaacattgtcggcgtttgttttgttggacaagacgttactagtcagaaaatcgtaatggataagttcatcaacatacaaggagattacaaggctattgtacatagcccaaaccctctaatcccgccaatttttgctgctgacgagaacacgtgctgcctggaatggaacatggcgatggaaaagcttacgggttggtctcgcagtgaagtgattgggaaaatgattgtcggggaagtgtttgggagctgttgcatgctaaagggtcctgatgctttaaccaagttcatgattgtattgcataatgcgattggtggccaagatacggataagttccctttcccattctttgaccgcaatgggaagtttgttcaggctctattgactgcaaacaagcgggttagcctcgagggaaaggttattggggctttctgtttcttgcaaatcccgagccctgagctgcagcaagctttagcagtccaacggaggcaggacacagagtgtttcacgaaggcaaaagagttggcttatatttgtcaggtgataaagaatcctttgagcggtatgcgtttcgcaaactcattgttggaggccacagacttgaacgaggaccagaagcagttacttgaaacaagtgtttcttgcgagaaacagatctcaaggatcgtcggggacatggatcttgaaagcattgaagacggttcatttgtgctaaagagggaagagtttttccttggaagtgtcataaacgcgattgtaagtcaagcgatgttcttattaagggacagaggtcttcagctgatccgtgacattcccgaagagatcaaatcaatagaggtttttggagaccagataaggattcaacagctcctggctgagtttctgctgagtataatccggtatgcaccatctcaagagtgggtggagatccatttaagccaactttcaaagcaaatggctgatggattcgccgccatccgcacagaattcagaatggcgtgtccaggtgaaggtctgcctccagagctagtccgagacatgttccatagcagcaggtggacaagccctgaaggtttaggtctaagcgtatgtcgaaagattttaaagctaatgaacggtgaggttcaatacatccgagaatcagaacggtcctatttcctcatcattctggaactccctgtacctcgaaagcgaccattgtcaactgctagtggaagtggtgacatgatgctgatgatgccatattagatggtttccggagtcgggggtagtggcggtggccgtggcggtggccgtggcggagaagaagaaccgtcgtcaagtcacactcctaataaccgaagaggaggagaacaagctcaatcgtcgggaacgaaatctctcagaccaagaagcaacactgaatcaatgagcaaagcaattcaacagtacaccgtcgacgcaagactccacgccgttttcgaacaatccggcgaatcagggaaatcattcgactactcacaatcactcaaaacgacgacgtacggttcctctgtacctgagcaacagatcacagcttatctctctcgaatccagcgaggtggttacattcagcctttcggatgtatgatcgccgtcgatgaatccagtttccggatcatcggttacagtgaaaacgccagagaaatgttagggattatgcctcaatctgttcctactcttgagaaacctgagattctagctatgggaactgatgtgagatctttgttcacttcttcgagctcgattctactcgagcgtgctttcgttgctcgagagattaccttgttaaatccggtttggatccattccaagaatactggtaaaccgttttacgccattcttcataggattgatgttggtgttgttattgatttagagccagctagaactgaagatcctgcgctttctattgctggtgctgttcaatcgcagaaactcgcggttcgtgcgatttctcagttacaggctcttcctggtggagatattaagcttttgtgtgacactgtcgtggaaagtgtgagggacttgactggttatgatcgtgttatggtttataagtttcatgaagatgagcatggagaagttgtagctgagagtaaacgagatgatttagagccttatattggactgcatgttcctgctactgatattcctcaagcgtcaaggttcttgtttaagcagaaccgtgtccgaatgatagtagattgcaatgccacacctgttcttgtggtccaggacgataggctaactcagtctatgtgcttggttggttctactcttagggctcctcatggttgtcactctcagtatatggctaacatgggatctattgcgtctttagcaatggcggttataatcaatggaaatgaagatgatgggagcaatgtagctagtggaagaagctcgatgaggctttggggtttggttgtttgccatcacacttcttctcgctgcataccgtttccgctaaggtatgcttgtgagtttttgatgcaggctttcggtttacagttaaacatggaattgcagttagctttgcaaatgtcagagaaacgcgttttgagaacgcagacactgttatgtgatatgcttctgcgtgactcgcctgctggaattgttacacagagtcccagtatcatggacttagtgaaatgtgacggtgcagcatttctttaccacgggaagtattacccgttgggtgttgctcctagtgaagttcagataaaagatgttgtggagtggttgcttgcgaatcatgcggattcaaccggattaagcactgatagtttaggcgatgcggggtatcccggtgcagctgcgttaggggatgctgtgtgcggtatggcagttgcatatatcacaaaaagagactttcttttttggtttcgatctcacactgcgaaagaaatcaaatggggaggcgctaagcatcatccggaggataaagatgatgggcaacgaatgcatcctcgttcgtcctttcaggcttttcttgaagttgttaagagccggagtcagccatgggaaactgcggaaatggatgcgattcactcgctccagcttattctgagagactcttttaaagaatctgaggcggctatgaactctaaagttgtggatggtgtggttcagccatgtagggatatggcgggggaacaggggattgatgagttaggtgcagttgcaagagagatggttaggctcattgagactgcaactgttcctatattcgctgtggatgccggaggctgcatcaatggatggaacgctaagattgcagagttgacaggtctctcagttgaagaagctatggggaagtctctggtttctgatttaatatacaaagagaatgaagcaactgtcaataagcttctttctcgtgctttgagaggggacgaggaaaagaatgtggaggttaagctgaaaactttcagccccgaactacaagggaaagcagtttttgtggttgtgaatgcttgttccagcaaggactacttgaacaacattgtcggcgtttgttttgttggacaagacgttactagtcagaaaatcgtaatggataagttcatcaacatacaaggagattacaaggctattgtacatagcccaaaccctctaatcccgccaatttttgctgctgacgagaacacgtgctgcctggaatggaacatggcgatggaaaagcttacgggttggtctcgcagtgaagtgattgggaaaatgattgtcggggaagtgtttgggagctgttgcatgctaaagggtcctgatgctttaaccaagttcatgattgtattgcataatgcgattggtggccaagatacggataagttccctttcccattctttgaccgcaatgggaagtttgttcaggctctattgactgcaaacaagcgggttagcctcgagggaaaggttattggggctttctgtttcttgcaaatcccgagccctgagctgcagcaagctttagcagtccaacggaggcaggacacagagtgtttcacgaaggcaaaagagttggcttatatttgtcaggtgataaagaatcctttgagcggtatgcgtttcgcaaactcattgttggaggccacagacttgaacgaggaccagaagcagttacttgaaacaagtgtttcttgcgagaaacagatctcaaggatcgtcggggacatggatcttgaaagcattgaagacggttcatttgtgctaaagagggaagagtttttccttggaagtgtcataaacgcgattgtaagtcaagcgatgttcttattaagggacagaggtcttcagctgatccgtgacattcccgaagagatcaaatcaatagaggtttttggagaccagataaggattcaacagctcctggctgagtttctgctgagtataatccggtatgcaccatctcaagagtgggtggagatccatttaagccaactttcaaagcaaatggctgatggattcgccgccatccgcacagaattcagaatggcgtgtccaggtgaaggtctgcctccagagctagtccgagacatgttccatagcagcaggtggacaagccctgaaggtttaggtctaagcgtatgtcgaaagattttaaagctaatgaacggtgaggttcaatacatccgagaatcagaacggtcctatttcctcatcattctggaactccctgtacctcgaaagcgaccattgtcaactgctagtggaagtggtgacatgatgctgatgatgccatattagatggtttccggagtcgggggtagtggcggtggccgtggcggtggccgtggcggagaagaagaaccgtcgtcaagtcacactcctaataaccgaagaggaggagaacaagctcaatcgtcgggaacgaaatctctcagaccaagaagcaacactgaatcaatgagcaaagcaattcaacagtacaccgtcgacgcaagactccacgccgttttcgaacaatccggcgaatcagggaaatcattcgactactcacaatcactcaaaacgacgacgtacggttcctctgtacctgagcaacagatcacagcttatctctctcgaatccagcgaggtggttacattcagcctttcggatgtatgatcgccgtcgatgaatccagtttccggatcatcggttacagtgaaaacgccagagaaatgttagggattatgcctcaatctgttcctactcttgagaaacctgagattctagctatgggaactgatgtgagatctttgttcacttcttcgagctcgattctactcgagcgtgctttcgttgctcgagagattaccttgttaaatccggtttggatccattccaagaatactggtaaaccgttttacgccattcttcataggattgatgttggtgttgttattgatttagagccagctagaactgaagatcctgcgctttctattgctggtgctgttcaatcgcagaaactcgcggttcgtgcgatttctcagttacaggctcttcctggtggagatattaagcttttgtgtgacactgtcgtggaaagtgtgagggacttgactggttatgatcgtgttatggtttataagtttcatgaagatgagcatggagaagttgtagctgagagtaaacgagatgatttagagccttatattggactgcatgttcctgctactgatattcctcaagcgtcaaggttcttgtttaagcagaaccgtgtccgaatgatagtagattgcaatgccacacctgttcttgtggtccaggacgataggctaactcagtctatgtgcttggttggttctactcttagggctcctcatggttgtcactctcagtatatggctaacatgggatctattgcgtctttagcaatggcggttataatcaatggaaatgaagatgatgggagcaatgtagctagtggaagaagctcgatgaggctttggggtttggttgtttgccatcacacttcttctcgctgcataccgtttccgctaaggtatgcttgtgagtttttgatgcaggctttcggtttacagttaaacatggaattgcagttagctttgcaaatgtcagagaaacgcgttttgagaacgcagacactgttatgtgatatgcttctgcgtgactcgcctgctggaattgttacacagagtcccagtatcatggacttagtgaaatgtgacggtgcagcatttctttaccacgggaagtattacccgttgggtgttgctcctagtgaagttcagataaaagatgttgtggagtggttgcttgcgaatcatgcggattcaaccggattaagcactgatagtttaggcgatgcggggtatcccggtgcagctgcgttaggggatgctgtgtgcggtatggcagttgcatatatcacaaaaagagactttcttttttggtttcgatctcacactgcgaaagaaatcaaatggggaggcgctaagcatcatccggaggataaagatgatgggcaacgaatgcatcctcgttcgtcctttcaggcttttcttgaagttgttaagagccggagtcagccatgggaaactgcggaaatggatgcgattcactcgctccagcttattctgagagactcttttaaagaatctgaggcggctatgaactctaaagttgtggatggtgtggttcagccatgtagggatatggcgggggaacaggggattgatgagttaggtgcagttgcaagagagatggttaggctcattgagactgcaactgttcctatattcgctgtggatgccggaggctgcatcaatggatggaacgctaagattgcagagttgacaggtctctcagttgaagaagctatggggaagtctctggtttctgatttaatatacaaagagaatgaagcaactgtcaataagcttctttctcgtgctttgagaggggacgaggaaaagaatgtggaggttaagctgaaaactttcagccccgaactacaagggaaagcagtttttgtggttgtgaatgcttgttccagcaaggactacttgaacaacattgtcggcgtttgttttgttggacaagacgttactagtcagaaaatcgtaatggataagttcatcaacatacaaggagattacaaggctattgtacatagcccaaaccctctaatcccgccaatttttgctgctgacgagaacacgtgctgcctggaatggaacatggcgatggaaaagcttacgggttggtctcgcagtgaagtgattgggaaaatgattgtcggggaagtgtttgggagctgttgcatgctaaagggtcctgatgctttaaccaagttcatgattgtattgcataatgcgattggtggccaagatacggataagttccctttcccattctttgaccgcaatgggaagtttgttcaggctctattgactgcaaacaagcgggttagcctcgagggaaaggttattggggctttctgtttcttgcaaatcccgagccctgagctgcagcaagctttagcagtccaacggaggcaggacacagagtgtttcacgaaggcaaaagagttggcttatatttgtcaggtgataaagaatcctttgagcggtatgcgtttcgcaaactcattgttggaggccacagacttgaacgaggaccagaagcagttacttgaaacaagtgtttcttgcgagaaacagatctcaaggatcgtcggggacatggatcttgaaagcattgaagacggttcatttgtgctaaagagggaagagtttttccttggaagtgtcataaacgcgattgtaagtcaagcgatgttcttattaagggacagaggtcttcagctgatccgtgacattcccgaagagatcaaatcaatagaggtttttggagaccagataaggattcaacagctcctggctgagtttctgctgagtataatccggtatgcaccatctcaagagtgggtggagatccatttaagccaactttcaaagcaaatggctgatggattcgccgccatccgcacagaattcagaatggcgtgtccaggtgaaggtctgcctccagagctagtccgagacatgttccatagcagcaggtggacaagccctgaaggtttaggtctaagcgtatgtcgaaagattttaaagctaatgaacggtgaggttcaatacatccgagaatcagaacggtcctatttcctcatcattctggaactccctgtacctcgaaagcgaccattgtcaactgctagtggaagtggtgacatgatgctgatgatgccatattagatggtttccggagtcgggggtagtggcggtggccgtggcggtggccgtggcggagaagaagaaccgtcgtcaagtcacactcctaataaccgaagaggaggagaacaagctcaatcgtcgggaacgaaatctctcagaccaagaagcaacactgaatcaatgagcaaagcaattcaacagtacaccgtcgacgcaagactccacgccgttttcgaacaatccggcgaatcagggaaatcattcgactactcacaatcactcaaaacgacgacgtacggttcctctgtacctgagcaacagatcacagcttatctctctcgaatccagcgaggtggttacattcagcctttcggatgtatgatcgccgtcgatgaatccagtttccggatcatcggttacagtgaaaacgccagagaaatgttagggattatgcctcaatctgttcctactcttgagaaacctgagattctagctatgggaactgatgtgagatctttgttcacttcttcgagctcgattctactcgagcgtgctttcgttgctcgagagattaccttgttaaatccggtttggatccattccaagaatactggtaaaccgttttacgccattcttcataggattgatgttggtgttgttattgatttagagccagctagaactgaagatcctgcgctttctattgctggtgctgttcaatcgcagaaactcgcggttcgtgcgatttctcagttacaggctcttcctggtggagatattaagcttttgtgtgacactgtcgtggaaagtgtgagggacttgactggttatgatcgtgttatggtttataagtttcatgaagatgagcatggagaagttgtagctgagagtaaacgagatgatttagagccttatattggactgcatgttcctgctactgatattcctcaagcgtcaaggttcttgtttaagcagaaccgtgtccgaatgatagtagattgcaatgccacacctgttcttgtggtccaggacgataggctaactcagtctatgtgcttggttggttctactcttagggctcctcatggttgtcactctcagtatatggctaacatgggatctattgcgtctttagcaatggcggttataatcaatggaaatgaagatgatgggagcaatgtagctagtggaagaagctcgatgaggctttggggtttggttgtttgccatcacacttcttctcgctgcataccgtttccgctaaggtatgcttgtgagtttttgatgcaggctttcggtttacagttaaacatggaattgcagttagctttgcaaatgtcagagaaacgcgttttgagaacgcagacactgttatgtgatatgcttctgcgtgactcgcctgctggaattgttacacagagtcccagtatcatggacttagtgaaatgtgacggtgcagcatttctttaccacgggaagtattacccgttgggtgttgctcctagtgaagttcagataaaagatgttgtggagtggttgcttgcgaatcatgcggattcaaccggattaagcactgatagtttaggcgatgcggggtatcccggtgcagctgcgttaggggatgctgtgtgcggtatggcagttgcatatatcacaaaaagagactttcttttttggtttcgatctcacactgcgaaagaaatcaaatggggaggcgctaagcatcatccggaggataaagatgatgggcaacgaatgcatcctcgttcgtcctttcaggcttttcttgaagttgttaagagccggagtcagccatgggaaactgcggaaatggatgcgattcactcgctccagcttattctgagagactcttttaaagaatctgaggcggctatgaactctaaagttgtggatggtgtggttcagccatgtagggatatggcgggggaacaggggattgatgagttaggtgcagttgcaagagagatggttaggctcattgagactgcaactgttcctatattcgctgtggatgccggaggctgcatcaatggatggaacgctaagattgcagagttgacaggtctctcagttgaagaagctatggggaagtctctggtttctgatttaatatacaaagagaatgaagcaactgtcaataagcttctttctcgtgctttgagaggggacgaggaaaagaatgtggaggttaagctgaaaactttcagccccgaactacaagggaaagcagtttttgtggttgtgaatgcttgttccagcaaggactacttgaacaacattgtcggcgtttgttttgttggacaagacgttactagtcagaaaatcgtaatggataagttcatcaacatacaaggagattacaaggctattgtacatagcccaaaccctctaatcccgccaatttttgctgctgacgagaacacgtgctgcctggaatggaacatggcgatggaaaagcttacgggttggtctcgcagtgaagtgattgggaaaatgattgtcggggaagtgtttgggagctgttgcatgctaaagggtcctgatgctttaaccaagttcatgattgtattgcataatgcgattggtggccaagatacggataagttccctttcccattctttgaccgcaatgggaagtttgttcaggctctattgactgcaaacaagcgggttagcctcgagggaaaggttattggggctttctgtttcttgcaaatcccgagccctgagctgcagcaagctttagcagtccaacggaggcaggacacagagtgtttcacgaaggcaaaagagttggcttatatttgtcaggtgataaagaatcctttgagcggtatgcgtttcgcaaactcattgttggaggccacagacttgaacgaggaccagaagcagttacttgaaacaagtgtttcttgcgagaaacagatctcaaggatcgtcggggacatggatcttgaaagcattgaagacggttcatttgtgctaaagagggaagagtttttccttggaagtgtcataaacgcgattgtaagtcaagcgatgttcttattaagggacagaggtcttcagctgatccgtgacattcccgaagagatcaaatcaatagaggtttttggagaccagataaggattcaacagctcctggctgagtttctgctgagtataatccggtatgcaccatctcaagagtgggtggagatccatttaagccaactttcaaagcaaatggctgatggattcgccgccatccgcacagaattcagaatggcgtgtccaggtgaaggtctgcctccagagctagtccgagacatgttccatagcagcaggtggacaagccctgaaggtttaggtctaagcgtatgtcgaaagattttaaagctaatgaacggtgaggttcaatacatccgagaatcagaacggtcctatttcctcatcattctggaactccctgtacctcgaaagcgaccattgtcaactgctagtggaagtggtgacatgatgctgatgatgccatattagatggtttccggagtcgggggtagtggcggtggccgtggcggtggccgtggcggagaagaagaaccgtcgtcaagtcacactcctaataaccgaagaggaggagaacaagctcaatcgtcgggaacgaaatctctcagaccaagaagcaacactgaatcaatgagcaaagcaattcaacagtacaccgtcgacgcaagactccacgccgttttcgaacaatccggcgaatcagggaaatcattcgactactcacaatcactcaaaacgacgacgtacggttcctctgtacctgagcaacagatcacagcttatctctctcgaatccagcgaggtggttacattcagcctttcggatgtatgatcgccgtcgatgaatccagtttccggatcatcggttacagtgaaaacgccagagaaatgttagggattatgcctcaatctgttcctactcttgagaaacctgagattctagctatgggaactgatgtgagatctttgttcacttcttcgagctcgattctactcgagcgtgctttcgttgctcgagagattaccttgttaaatccggtttggatccattccaagaatactggtaaaccgttttacgccattcttcataggattgatgttggtgttgttattgatttagagccagctagaactgaagatcctgcgctttctattgctggtgctgttcaatcgcagaaactcgcggttcgtgcgatttctcagttacaggctcttcctggtggagatattaagcttttgtgtgacactgtcgtggaaagtgtgagggacttgactggttatgatcgtgttatggtttataagtttcatgaagatgagcatggagaagttgtagctgagagtaaacgagatgatttagagccttatattggactgcatgttcctgctactgatattcctcaagcgtcaaggttcttgtttaagcagaaccgtgtccgaatgatagtagattgcaatgccacacctgttcttgtggtccaggacgataggctaactcagtctatgtgcttggttggttctactcttagggctcctcatggttgtcactctcagtatatggctaacatgggatctattgcgtctttagcaatggcggttataatcaatggaaatgaagatgatgggagcaatgtagctagtggaagaagctcgatgaggctttggggtttggttgtttgccatcacacttcttctcgctgcataccgtttccgctaaggtatgcttgtgagtttttgatgcaggctttcggtttacagttaaacatggaattgcagttagctttgcaaatgtcagagaaacgcgttttgagaacgcagacactgttatgtgatatgcttctgcgtgactcgcctgctggaattgttacacagagtcccagtatcatggacttagtgaaatgtgacggtgcagcatttctttaccacgggaagtattacccgttgggtgttgctcctagtgaagttcagataaaagatgttgtggagtggttgcttgcgaatcatgcggattcaaccggattaagcactgatagtttaggcgatgcggggtatcccggtgcagctgcgttaggggatgctgtgtgcggtatggcagttgcatatatcacaaaaagagactttcttttttggtttcgatctcacactgcgaaagaaatcaaatggggaggcgctaagcatcatccggaggataaagatgatgggcaacgaatgcatcctcgttcgtcctttcaggcttttcttgaagttgttaagagccggagtcagccatgggaaactgcggaaatggatgcgattcactcgctccagcttattctgagagactcttttaaagaatctgaggcggctatgaactctaaagttgtggatggtgtggttcagccatgtagggatatggcgggggaacaggggattgatgagttaggtgcagttgcaagagagatggttaggctcattgagactgcaactgttcctatattcgctgtggatgccggaggctgcatcaatggatggaacgctaagattgcagagttgacaggtctctcagttgaagaagctatggggaagtctctggtttctgatttaatatacaaagagaatgaagcaactgtcaataagcttctttctcgtgctttgagaggggacgaggaaaagaatgtggaggttaagctgaaaactttcagccccgaactacaagggaaagcagtttttgtggttgtgaatgcttgttccagcaaggactacttgaacaacattgtcggcgtttgttttgttggacaagacgttactagtcagaaaatcgtaatggataagttcatcaacatacaaggagattacaaggctattgtacatagcccaaaccctctaatcccgccaatttttgctgctgacgagaacacgtgctgcctggaatggaacatggcgatggaaaagcttacgggttggtctcgcagtgaagtgattgggaaaatgattgtcggggaagtgtttgggagctgttgcatgctaaagggtcctgatgctttaaccaagttcatgattgtattgcataatgcgattggtggccaagatacggataagttccctttcccattctttgaccgcaatgggaagtttgttcaggctctattgactgcaaacaagcgggttagcctcgagggaaaggttattggggctttctgtttcttgcaaatcccgagccctgagctgcagcaagctttagcagtccaacggaggcaggacacagagtgtttcacgaaggcaaaagagttggcttatatttgtcaggtgataaagaatcctttgagcggtatgcgtttcgcaaactcattgttggaggccacagacttgaacgaggaccagaagcagttacttgaaacaagtgtttcttgcgagaaacagatctcaaggatcgtcggggacatggatcttgaaagcattgaagacggttcatttgtgctaaagagggaagagtttttccttggaagtgtcataaacgcgattgtaagtcaagcgatgttcttattaagggacagaggtcttcagctgatccgtgacattcccgaagagatcaaatcaatagaggtttttggagaccagataaggattcaacagctcctggctgagtttctgctgagtataatccggtatgcaccatctcaagagtgggtggagatccatttaagccaactttcaaagcaaatggctgatggattcgccgccatccgcacagaattcagaatggcgtgtccaggtgaaggtctgcctccagagctagtccgagacatgttccatagcagcaggtggacaagccctgaaggtttaggtctaagcgtatgtcgaaagattttaaagctaatgaacggtgaggttcaatacatccgagaatcagaacggtcctatttcctcatcattctggaactccctgtacctcgaaagcgaccattgtcaactgctagtggaagtggtgacatgatgctgatgatgccatattagatggtttccggagtcgggggtagtggcggtggccgtggcggtggccgtggcggagaagaagaaccgtcgtcaagtcacactcctaataaccgaagaggaggagaacaagctcaatcgtcgggaacgaaatctctcagaccaagaagcaacactgaatcaatgagcaaagcaattcaacagtacaccgtcgacgcaagactccacgccgttttcgaacaatccggcgaatcagggaaatcattcgactactcacaatcactcaaaacgacgacgtacggttcctctgtacctgagcaacagatcacagcttatctctctcgaatccagcgaggtggttacattcagcctttcggatgtatgatcgccgtcgatgaatccagtttccggatcatcggttacagtgaaaacgccagagaaatgttagggattatgcctcaatctgttcctactcttgagaaacctgagattctagctatgggaactgatgtgagatctttgttcacttcttcgagctcgattctactcgagcgtgctttcgttgctcgagagattaccttgttaaatccggtttggatccattccaagaatactggtaaaccgttttacgccattcttcataggattgatgttggtgttgttattgatttagagccagctagaactgaagatcctgcgctttctattgctggtgctgttcaatcgcagaaactcgcggttcgtgcgatttctcagttacaggctcttcctggtggagatattaagcttttgtgtgacactgtcgtggaaagtgtgagggacttgactggttatgatcgtgttatggtttataagtttcatgaagatgagcatggagaagttgtagctgagagtaaacgagatgatttagagccttatattggactgcatgttcctgctactgatattcctcaagcgtcaaggttcttgtttaagcagaaccgtgtccgaatgatagtagattgcaatgccacacctgttcttgtggtccaggacgataggctaactcagtctatgtgcttggttggttctactcttagggctcctcatggttgtcactctcagtatatggctaacatgggatctattgcgtctttagcaatggcggttataatcaatggaaatgaagatgatgggagcaatgtagctagtggaagaagctcgatgaggctttggggtttggttgtttgccatcacacttcttctcgctgcataccgtttccgctaaggtatgcttgtgagtttttgatgcaggctttcggtttacagttaaacatggaattgcagttagctttgcaaatgtcagagaaacgcgttttgagaacgcagacactgttatgtgatatgcttctgcgtgactcgcctgctggaattgttacacagagtcccagtatcatggacttagtgaaatgtgacggtgcagcatttctttaccacgggaagtattacccgttgggtgttgctcctagtgaagttcagataaaagatgttgtggagtggttgcttgcgaatcatgcggattcaaccggattaagcactgatagtttaggcgatgcggggtatcccggtgcagctgcgttaggggatgctgtgtgcggtatggcagttgcatatatcacaaaaagagactttcttttttggtttcgatctcacactgcgaaagaaatcaaatggggaggcgctaagcatcatccggaggataaagatgatgggcaacgaatgcatcctcgttcgtcctttcaggcttttcttgaagttgttaagagccggagtcagccatgggaaactgcggaaatggatgcgattcactcgctccagcttattctgagagactcttttaaagaatctgaggcggctatgaactctaaagttgtggatggtgtggttcagccatgtagggatatggcgggggaacaggggattgatgagttaggtgcagttgcaagagagatggttaggctcattgagactgcaactgttcctatattcgctgtggatgccggaggctgcatcaatggatggaacgctaagattgcagagttgacaggtctctcagttgaagaagctatggggaagtctctggtttctgatttaatatacaaagagaatgaagcaactgtcaataagcttctttctcgtgctttgagaggggacgaggaaaagaatgtggaggttaagctgaaaactttcagccccgaactacaagggaaagcagtttttgtggttgtgaatgcttgttccagcaaggactacttgaacaacattgtcggcgtttgttttgttggacaagacgttactagtcagaaaatcgtaatggataagttcatcaacatacaaggagattacaaggctattgtacatagcccaaaccctctaatcccgccaatttttgctgctgacgagaacacgtgctgcctggaatggaacatggcgatggaaaagcttacgggttggtctcgcagtgaagtgattgggaaaatgattgtcggggaagtgtttgggagctgttgcatgctaaagggtcctgatgctttaaccaagttcatgattgtattgcataatgcgattggtggccaagatacggataagttccctttcccattctttgaccgcaatgggaagtttgttcaggctctattgactgcaaacaagcgggttagcctcgagggaaaggttattggggctttctgtttcttgcaaatcccgagccctgagctgcagcaagctttagcagtccaacggaggcaggacacagagtgtttcacgaaggcaaaagagttggcttatatttgtcaggtgataaagaatcctttgagcggtatgcgtttcgcaaactcattgttggaggccacagacttgaacgaggaccagaagcagttacttgaaacaagtgtttcttgcgagaaacagatctcaaggatcgtcggggacatggatcttgaaagcattgaagacggttcatttgtgctaaagagggaagagtttttccttggaagtgtcataaacgcgattgtaagtcaagcgatgttcttattaagggacagaggtcttcagctgatccgtgacattcccgaagagatcaaatcaatagaggtttttggagaccagataaggattcaacagctcctggctgagtttctgctgagtataatccggtatgcaccatctcaagagtgggtggagatccatttaagccaactttcaaagcaaatggctgatggattcgccgccatccgcacagaattcagaatggcgtgtccaggtgaaggtctgcctccagagctagtccgagacatgttccatagcagcaggtggacaagccctgaaggtttaggtctaagcgtatgtcgaaagattttaaagctaatgaacggtgaggttcaatacatccgagaatcagaacggtcctatttcctcatcattctggaactccctgtacctcgaaagcgaccattgtcaactgctagtggaagtggtgacatgatgctgatgatgccatattagatggtttccggagtcgggggtagtggcggtggccgtggcggtggccgtggcggagaagaagaaccgtcgtcaagtcacactcctaataaccgaagaggaggagaacaagctcaatcgtcgggaacgaaatctctcagaccaagaagcaacactgaatcaatgagcaaagcaattcaacagtacaccgtcgacgcaagactccacgccgttttcgaacaatccggcgaatcagggaaatcattcgactactcacaatcactcaaaacgacgacgtacggttcctctgtacctgagcaacagatcacagcttatctctctcgaatccagcgaggtggttacattcagcctttcggatgtatgatcgccgtcgatgaatccagtttccggatcatcggttacagtgaaaacgccagagaaatgttagggattatgcctcaatctgttcctactcttgagaaacctgagattctagctatgggaactgatgtgagatctttgttcacttcttcgagctcgattctactcgagcgtgctttcgttgctcgagagattaccttgttaaatccggtttggatccattccaagaatactggtaaaccgttttacgccattcttcataggattgatgttggtgttgttattgatttagagccagctagaactgaagatcctgcgctttctattgctggtgctgttcaatcgcagaaactcgcggttcgtgcgatttctcagttacaggctcttcctggtggagatattaagcttttgtgtgacactgtcgtggaaagtgtgagggacttgactggttatgatcgtgttatggtttataagtttcatgaagatgagcatggagaagttgtagctgagagtaaacgagatgatttagagccttatattggactgcatgttcctgctactgatattcctcaagcgtcaaggttcttgtttaagcagaaccgtgtccgaatgatagtagattgcaatgccacacctgttcttgtggtccaggacgataggctaactcagtctatgtgcttggttggttctactcttagggctcctcatggttgtcactctcagtatatggctaacatgggatctattgcgtctttagcaatggcggttataatcaatggaaatgaagatgatgggagcaatgtagctagtggaagaagctcgatgaggctttggggtttggttgtttgccatcacacttcttctcgctgcataccgtttccgctaaggtatgcttgtgagtttttgatgcaggctttcggtttacagttaaacatggaattgcagttagctttgcaaatgtcagagaaacgcgttttgagaacgcagacactgttatgtgatatgcttctgcgtgactcgcctgctggaattgttacacagagtcccagtatcatggacttagtgaaatgtgacggtgcagcatttctttaccacgggaagtattacccgttgggtgttgctcctagtgaagttcagataaaagatgttgtggagtggttgcttgcgaatcatgcggattcaaccggattaagcactgatagtttaggcgatgcggggtatcccggtgcagctgcgttaggggatgctgtgtgcggtatggcagttgcatatatcacaaaaagagactttcttttttggtttcgatctcacactgcgaaagaaatcaaatggggaggcgctaagcatcatccggaggataaagatgatgggcaacgaatgcatcctcgttcgtcctttcaggcttttcttgaagttgttaagagccggagtcagccatgggaaactgcggaaatggatgcgattcactcgctccagcttattctgagagactcttttaaagaatctgaggcggctatgaactctaaagttgtggatggtgtggttcagccatgtagggatatggcgggggaacaggggattgatgagttaggtgcagttgcaagagagatggttaggctcattgagactgcaactgttcctatattcgctgtggatgccggaggctgcatcaatggatggaacgctaagattgcagagttgacaggtctctcagttgaagaagctatggggaagtctctggtttctgatttaatatacaaagagaatgaagcaactgtcaataagcttctttctcgtgctttgagaggggacgaggaaaagaatgtggaggttaagctgaaaactttcagccccgaactacaagggaaagcagtttttgtggttgtgaatgcttgttccagcaaggactacttgaacaacattgtcggcgtttgttttgttggacaagacgttactagtcagaaaatcgtaatggataagttcatcaacatacaaggagattacaaggctattgtacatagcccaaaccctctaatcccgccaatttttgctgctgacgagaacacgtgctgcctggaatggaacatggcgatggaaaagcttacgggttggtctcgcagtgaagtgattgggaaaatgattgtcggggaagtgtttgggagctgttgcatgctaaagggtcctgatgctttaaccaagttcatgattgtattgcataatgcgattggtggccaagatacggataagttccctttcccattctttgaccgcaatgggaagtttgttcaggctctattgactgcaaacaagcgggttagcctcgagggaaaggttattggggctttctgtttcttgcaaatcccgagccctgagctgcagcaagctttagcagtccaacggaggcaggacacagagtgtttcacgaaggcaaaagagttggcttatatttgtcaggtgataaagaatcctttgagcggtatgcgtttcgcaaactcattgttggaggccacagacttgaacgaggaccagaagcagttacttgaaacaagtgtttcttgcgagaaacagatctcaaggatcgtcggggacatggatcttgaaagcattgaagacggttcatttgtgctaaagagggaagagtttttccttggaagtgtcataaacgcgattgtaagtcaagcgatgttcttattaagggacagaggtcttcagctgatccgtgacattcccgaagagatcaaatcaatagaggtttttggagaccagataaggattcaacagctcctggctgagtttctgctgagtataatccggtatgcaccatctcaagagtgggtggagatccatttaagccaactttcaaagcaaatggctgatggattcgccgccatccgcacagaattcagaatggcgtgtccaggtgaaggtctgcctccagagctagtccgagacatgttccatagcagcaggtggacaagccctgaaggtttaggtctaagcgtatgtcgaaagattttaaagctaatgaacggtgaggttcaatacatccgagaatcagaacggtcctatttcctcatcattctggaactccctgtacctcgaaagcgaccattgtcaactgctagtggaagtggtgacatgatgctgatgatgccatattagatggtttccggagtcgggggtagtggcggtggccgtggcggtggccgtggcggagaagaagaaccgtcgtcaagtcacactcctaataaccgaagaggaggagaacaagctcaatcgtcgggaacgaaatctctcagaccaagaagcaacactgaatcaatgagcaaagcaattcaacagtacaccgtcgacgcaagactccacgccgttttcgaacaatccggcgaatcagggaaatcattcgactactcacaatcactcaaaacgacgacgtacggttcctctgtacctgagcaacagatcacagcttatctctctcgaatccagcgaggtggttacattcagcctttcggatgtatgatcgccgtcgatgaatccagtttccggatcatcggttacagtgaaaacgccagagaaatgttagggattatgcctcaatctgttcctactcttgagaaacctgagattctagctatgggaactgatgtgagatctttgttcacttcttcgagctcgattctactcgagcgtgctttcgttgctcgagagattaccttgttaaatccggtttggatccattccaagaatactggtaaaccgttttacgccattcttcataggattgatgttggtgttgttattgatttagagccagctagaactgaagatcctgcgctttctattgctggtgctgttcaatcgcagaaactcgcggttcgtgcgatttctcagttacaggctcttcctggtggagatattaagcttttgtgtgacactgtcgtggaaagtgtgagggacttgactggttatgatcgtgttatggtttataagtttcatgaagatgagcatggagaagttgtagctgagagtaaacgagatgatttagagccttatattggactgcatgttcctgctactgatattcctcaagcgtcaaggttcttgtttaagcagaaccgtgtccgaatgatagtagattgcaatgccacacctgttcttgtggtccaggacgataggctaactcagtctatgtgcttggttggttctactcttagggctcctcatggttgtcactctcagtatatggctaacatgggatctattgcgtctttagcaatggcggttataatcaatggaaatgaagatgatgggagcaatgtagctagtggaagaagctcgatgaggctttggggtttggttgtttgccatcacacttcttctcgctgcataccgtttccgctaaggtatgcttgtgagtttttgatgcaggctttcggtttacagttaaacatggaattgcagttagctttgcaaatgtcagagaaacgcgttttgagaacgcagacactgttatgtgatatgcttctgcgtgactcgcctgctggaattgttacacagagtcccagtatcatggacttagtgaaatgtgacggtgcagcatttctttaccacgggaagtattacccgttgggtgttgctcctagtgaagttcagataaaagatgttgtggagtggttgcttgcgaatcatgcggattcaaccggattaagcactgatagtttaggcgatgcggggtatcccggtgcagctgcgttaggggatgctgtgtgcggtatggcagttgcatatatcacaaaaagagactttcttttttggtttcgatctcacactgcgaaagaaatcaaatggggaggcgctaagcatcatccggaggataaagatgatgggcaacgaatgcatcctcgttcgtcctttcaggcttttcttgaagttgttaagagccggagtcagccatgggaaactgcggaaatggatgcgattcactcgctccagcttattctgagagactcttttaaagaatctgaggcggctatgaactctaaagttgtggatggtgtggttcagccatgtagggatatggcgggggaacaggggattgatgagttaggtgcagttgcaagagagatggttaggctcattgagactgcaactgttcctatattcgctgtggatgccggaggctgcatcaatggatggaacgctaagattgcagagttgacaggtctctcagttgaagaagctatggggaagtctctggtttctgatttaatatacaaagagaatgaagcaactgtcaataagcttctttctcgtgctttgagaggggacgaggaaaagaatgtggaggttaagctgaaaactttcagccccgaactacaagggaaagcagtttttgtggttgtgaatgcttgttccagcaaggactacttgaacaacattgtcggcgtttgttttgttggacaagacgttactagtcagaaaatcgtaatggataagttcatcaacatacaaggagattacaaggctattgtacatagcccaaaccctctaatcccgccaatttttgctgctgacgagaacacgtgctgcctggaatggaacatggcgatggaaaagcttacgggttggtctcgcagtgaagtgattgggaaaatgattgtcggggaagtgtttgggagctgttgcatgctaaagggtcctgatgctttaaccaagttcatgattgtattgcataatgcgattggtggccaagatacggataagttccctttcccattctttgaccgcaatgggaagtttgttcaggctctattgactgcaaacaagcgggttagcctcgagggaaaggttattggggctttctgtttcttgcaaatcccgagccctgagctgcagcaagctttagcagtccaacggaggcaggacacagagtgtttcacgaaggcaaaagagttggcttatatttgtcaggtgataaagaatcctttgagcggtatgcgtttcgcaaactcattgttggaggccacagacttgaacgaggaccagaagcagttacttgaaacaagtgtttcttgcgagaaacagatctcaaggatcgtcggggacatggatcttgaaagcattgaagacggttcatttgtgctaaagagggaagagtttttccttggaagtgtcataaacgcgattgtaagtcaagcgatgttcttattaagggacagaggtcttcagctgatccgtgacattcccgaagagatcaaatcaatagaggtttttggagaccagataaggattcaacagctcctggctgagtttctgctgagtataatccggtatgcaccatctcaagagtgggtggagatccatttaagccaactttcaaagcaaatggctgatggattcgccgccatccgcacagaattcagaatggcgtgtccaggtgaaggtctgcctccagagctagtccgagacatgttccatagcagcaggtggacaagccctgaaggtttaggtctaagcgtatgtcgaaagattttaaagctaatgaacggtgaggttcaatacatccgagaatcagaacggtcctatttcctcatcattctggaactccctgtacctcgaaagcgaccattgtcaactgctagtggaagtggtgacatgatgctgatgatgccatattagatggtttccggagtcgggggtagtggcggtggccgtggcggtggccgtggcggagaagaagaaccgtcgtcaagtcacactcctaataaccgaagaggaggagaacaagctcaatcgtcgggaacgaaatctctcagaccaagaagcaacactgaatcaatgagcaaagcaattcaacagtacaccgtcgacgcaagactccacgccgttttcgaacaatccggcgaatcagggaaatcattcgactactcacaatcactcaaaacgacgacgtacggttcctctgtacctgagcaacagatcacagcttatctctctcgaatccagcgaggtggttacattcagcctttcggatgtatgatcgccgtcgatgaatccagtttccggatcatcggttacagtgaaaacgccagagaaatgttagggattatgcctcaatctgttcctactcttgagaaacctgagattctagctatgggaactgatgtgagatctttgttcacttcttcgagctcgattctactcgagcgtgctttcgttgctcgagagattaccttgttaaatccggtttggatccattccaagaatactggtaaaccgttttacgccattcttcataggattgatgttggtgttgttattgatttagagccagctagaactgaagatcctgcgctttctattgctggtgctgttcaatcgcagaaactcgcggttcgtgcgatttctcagttacaggctcttcctggtggagatattaagcttttgtgtgacactgtcgtggaaagtgtgagggacttgactggttatgatcgtgttatggtttataagtttcatgaagatgagcatggagaagttgtagctgagagtaaacgagatgatttagagccttatattggactgcatgttcctgctactgatattcctcaagcgtcaaggttcttgtttaagcagaaccgtgtccgaatgatagtagattgcaatgccacacctgttcttgtggtccaggacgataggctaactcagtctatgtgcttggttggttctactcttagggctcctcatggttgtcactctcagtatatggctaacatgggatctattgcgtctttagcaatggcggttataatcaatggaaatgaagatgatgggagcaatgtagctagtggaagaagctcgatgaggctttggggtttggttgtttgccatcacacttcttctcgctgcataccgtttccgctaaggtatgcttgtgagtttttgatgcaggctttcggtttacagttaaacatggaattgcagttagctttgcaaatgtcagagaaacgcgttttgagaacgcagacactgttatgtgatatgcttctgcgtgactcgcctgctggaattgttacacagagtcccagtatcatggacttagtgaaatgtgacggtgcagcatttctttaccacgggaagtattacccgttgggtgttgctcctagtgaagttcagataaaagatgttgtggagtggttgcttgcgaatcatgcggattcaaccggattaagcactgatagtttaggcgatgcggggtatcccggtgcagctgcgttaggggatgctgtgtgcggtatggcagttgcatatatcacaaaaagagactttcttttttggtttcgatctcacactgcgaaagaaatcaaatggggaggcgctaagcatcatccggaggataaagatgatgggcaacgaatgcatcctcgttcgtcctttcaggcttttcttgaagttgttaagagccggagtcagccatgggaaactgcggaaatggatgcgattcactcgctccagcttattctgagagactcttttaaagaatctgaggcggctatgaactctaaagttgtggatggtgtggttcagccatgtagggatatggcgggggaacaggggattgatgagttaggtgcagttgcaagagagatggttaggctcattgagactgcaactgttcctatattcgctgtggatgccggaggctgcatcaatggatggaacgctaagattgcagagttgacaggtctctcagttgaagaagctatggggaagtctctggtttctgatttaatatacaaagagaatgaagcaactgtcaataagcttctttctcgtgctttgagaggggacgaggaaaagaatgtggaggttaagctgaaaactttcagccccgaactacaagggaaagcagtttttgtggttgtgaatgcttgttccagcaaggactacttgaacaacattgtcggcgtttgttttgttggacaagacgttactagtcagaaaatcgtaatggataagttcatcaacatacaaggagattacaaggctattgtacatagcccaaaccctctaatcccgccaatttttgctgctgacgagaacacgtgctgcctggaatggaacatggcgatggaaaagcttacgggttggtctcgcagtgaagtgattgggaaaatgattgtcggggaagtgtttgggagctgttgcatgctaaagggtcctgatgctttaaccaagttcatgattgtattgcataatgcgattggtggccaagatacggataagttccctttcccattctttgaccgcaatgggaagtttgttcaggctctattgactgcaaacaagcgggttagcctcgagggaaaggttattggggctttctgtttcttgcaaatcccgagccctgagctgcagcaagctttagcagtccaacggaggcaggacacagagtgtttcacgaaggcaaaagagttggcttatatttgtcaggtgataaagaatcctttgagcggtatgcgtttcgcaaactcattgttggaggccacagacttgaacgaggaccagaagcagttacttgaaacaagtgtttcttgcgagaaacagatctcaaggatcgtcggggacatggatcttgaaagcattgaagacggttcatttgtgctaaagagggaagagtttttccttggaagtgtcataaacgcgattgtaagtcaagcgatgttcttattaagggacagaggtcttcagctgatccgtgacattcccgaagagatcaaatcaatagaggtttttggagaccagataaggattcaacagctcctggctgagtttctgctgagtataatccggtatgcaccatctcaagagtgggtggagatccatttaagccaactttcaaagcaaatggctgatggattcgccgccatccgcacagaattcagaatggcgtgtccaggtgaaggtctgcctccagagctagtccgagacatgttccatagcagcaggtggacaagccctgaaggtttaggtctaagcgtatgtcgaaagattttaaagctaatgaacggtgaggttcaatacatccgagaatcagaacggtcctatttcctcatcattctggaactccctgtacctcgaaagcgaccattgtcaactgctagtggaagtggtgacatgatgctgatgatgccatattagatggtttccggagtcgggggtagtggcggtggccgtggcggtggccgtggcggagaagaagaaccgtcgtcaagtcacactcctaataaccgaagaggaggagaacaagctcaatcgtcgggaacgaaatctctcagaccaagaagcaacactgaatcaatgagcaaagcaattcaacagtacaccgtcgacgcaagactccacgccgttttcgaacaatccggcgaatcagggaaatcattcgactactcacaatcactcaaaacgacgacgtacggttcctctgtacctgagcaacagatcacagcttatctctctcgaatccagcgaggtggttacattcagcctttcggatgtatgatcgccgtcgatgaatccagtttccggatcatcggttacagtgaaaacgccagagaaatgttagggattatgcctcaatctgttcctactcttgagaaacctgagattctagctatgggaactgatgtgagatctttgttcacttcttcgagctcgattctactcgagcgtgctttcgttgctcgagagattaccttgttaaatccggtttggatccattccaagaatactggtaaaccgttttacgccattcttcataggattgatgttggtgttgttattgatttagagccagctagaactgaagatcctgcgctttctattgctggtgctgttcaatcgcagaaactcgcggttcgtgcgatttctcagttacaggctcttcctggtggagatattaagcttttgtgtgacactgtcgtggaaagtgtgagggacttgactggttatgatcgtgttatggtttataagtttcatgaagatgagcatggagaagttgtagctgagagtaaacgagatgatttagagccttatattggactgcatgttcctgctactgatattcctcaagcgtcaaggttcttgtttaagcagaaccgtgtccgaatgatagtagattgcaatgccacacctgttcttgtggtccaggacgataggctaactcagtctatgtgcttggttggttctactcttagggctcctcatggttgtcactctcagtatatggctaacatgggatctattgcgtctttagcaatggcggttataatcaatggaaatgaagatgatgggagcaatgtagctagtggaagaagctcgatgaggctttggggtttggttgtttgccatcacacttcttctcgctgcataccgtttccgctaaggtatgcttgtgagtttttgatgcaggctttcggtttacagttaaacatggaattgcagttagctttgcaaatgtcagagaaacgcgttttgagaacgcagacactgttatgtgatatgcttctgcgtgactcgcctgctggaattgttacacagagtcccagtatcatggacttagtgaaatgtgacggtgcagcatttctttaccacgggaagtattacccgttgggtgttgctcctagtgaagttcagataaaagatgttgtggagtggttgcttgcgaatcatgcggattcaaccggattaagcactgatagtttaggcgatgcggggtatcccggtgcagctgcgttaggggatgctgtgtgcggtatggcagttgcatatatcacaaaaagagactttcttttttggtttcgatctcacactgcgaaagaaatcaaatggggaggcgctaagcatcatccggaggataaagatgatgggcaacgaatgcatcctcgttcgtcctttcaggcttttcttgaagttgttaagagccggagtcagccatgggaaactgcggaaatggatgcgattcactcgctccagcttattctgagagactcttttaaagaatctgaggcggctatgaactctaaagttgtggatggtgtggttcagccatgtagggatatggcgggggaacaggggattgatgagttaggtgcagttgcaagagagatggttaggctcattgagactgcaactgttcctatattcgctgtggatgccggaggctgcatcaatggatggaacgctaagattgcagagttgacaggtctctcagttgaagaagctatggggaagtctctggtttctgatttaatatacaaagagaatgaagcaactgtcaataagcttctttctcgtgctttgagaggggacgaggaaaagaatgtggaggttaagctgaaaactttcagccccgaactacaagggaaagcagtttttgtggttgtgaatgcttgttccagcaaggactacttgaacaacattgtcggcgtttgttttgttggacaagacgttactagtcagaaaatcgtaatggataagttcatcaacatacaaggagattacaaggctattgtacatagcccaaaccctctaatcccgccaatttttgctgctgacgagaacacgtgctgcctggaatggaacatggcgatggaaaagcttacgggttggtctcgcagtgaagtgattgggaaaatgattgtcggggaagtgtttgggagctgttgcatgctaaagggtcctgatgctttaaccaagttcatgattgtattgcataatgcgattggtggccaagatacggataagttccctttcccattctttgaccgcaatgggaagtttgttcaggctctattgactgcaaacaagcgggttagcctcgagggaaaggttattggggctttctgtttcttgcaaatcccgagccctgagctgcagcaagctttagcagtccaacggaggcaggacacagagtgtttcacgaaggcaaaagagttggcttatatttgtcaggtgataaagaatcctttgagcggtatgcgtttcgcaaactcattgttggaggccacagacttgaacgaggaccagaagcagttacttgaaacaagtgtttcttgcgagaaacagatctcaaggatcgtcggggacatggatcttgaaagcattgaagacggttcatttgtgctaaagagggaagagtttttccttggaagtgtcataaacgcgattgtaagtcaagcgatgttcttattaagggacagaggtcttcagctgatccgtgacattcccgaagagatcaaatcaatagaggtttttggagaccagataaggattcaacagctcctggctgagtttctgctgagtataatccggtatgcaccatctcaagagtgggtggagatccatttaagccaactttcaaagcaaatggctgatggattcgccgccatccgcacagaattcagaatggcgtgtccaggtgaaggtctgcctccagagctagtccgagacatgttccatagcagcaggtggacaagccctgaaggtttaggtctaagcgtatgtcgaaagattttaaagctaatgaacggtgaggttcaatacatccgagaatcagaacggtcctatttcctcatcattctggaactccctgtacctcgaaagcgaccattgtcaactgctagtggaagtggtgacatgatgctgatgatgccatattagatggtttccggagtcgggggtagtggcggtggccgtggcggtggccgtggcggagaagaagaaccgtcgtcaagtcacactcctaataaccgaagaggaggagaacaagctcaatcgtcgggaacgaaatctctcagaccaagaagcaacactgaatcaatgagcaaagcaattcaacagtacaccgtcgacgcaagactccacgccgttttcgaacaatccggcgaatcagggaaatcattcgactactcacaatcactcaaaacgacgacgtacggttcctctgtacctgagcaacagatcacagcttatctctctcgaatccagcgaggtggttacattcagcctttcggatgtatgatcgccgtcgatgaatccagtttccggatcatcggttacagtgaaaacgccagagaaatgttagggattatgcctcaatctgttcctactcttgagaaacctgagattctagctatgggaactgatgtgagatctttgttcacttcttcgagctcgattctactcgagcgtgctttcgttgctcgagagattaccttgttaaatccggtttggatccattccaagaatactggtaaaccgttttacgccattcttcataggattgatgttggtgttgttattgatttagagccagctagaactgaagatcctgcgctttctattgctggtgctgttcaatcgcagaaactcgcggttcgtgcgatttctcagttacaggctcttcctggtggagatattaagcttttgtgtgacactgtcgtggaaagtgtgagggacttgactggttatgatcgtgttatggtttataagtttcatgaagatgagcatggagaagttgtagctgagagtaaacgagatgatttagagccttatattggactgcatgttcctgctactgatattcctcaagcgtcaaggttcttgtttaagcagaaccgtgtccgaatgatagtagattgcaatgccacacctgttcttgtggtccaggacgataggctaactcagtctatgtgcttggttggttctactcttagggctcctcatggttgtcactctcagtatatggctaacatgggatctattgcgtctttagcaatggcggttataatcaatggaaatgaagatgatgggagcaatgtagctagtggaagaagctcgatgaggctttggggtttggttgtttgccatcacacttcttctcgctgcataccgtttccgctaaggtatgcttgtgagtttttgatgcaggctttcggtttacagttaaacatggaattgcagttagctttgcaaatgtcagagaaacgcgttttgagaacgcagacactgttatgtgatatgcttctgcgtgactcgcctgctggaattgttacacagagtcccagtatcatggacttagtgaaatgtgacggtgcagcatttctttaccacgggaagtattacccgttgggtgttgctcctagtgaagttcagataaaagatgttgtggagtggttgcttgcgaatcatgcggattcaaccggattaagcactgatagtttaggcgatgcggggtatcccggtgcagctgcgttaggggatgctgtgtgcggtatggcagttgcatatatcacaaaaagagactttcttttttggtttcgatctcacactgcgaaagaaatcaaatggggaggcgctaagcatcatccggaggataaagatgatgggcaacgaatgcatcctcgttcgtcctttcaggcttttcttgaagttgttaagagccggagtcagccatgggaaactgcggaaatggatgcgattcactcgctccagcttattctgagagactcttttaaagaatctgaggcggctatgaactctaaagttgtggatggtgtggttcagccatgtagggatatggcgggggaacaggggattgatgagttaggtgcagttgcaagagagatggttaggctcattgagactgcaactgttcctatattcgctgtggatgccggaggctgcatcaatggatggaacgctaagattgcagagttgacaggtctctcagttgaagaagctatggggaagtctctggtttctgatttaatatacaaagagaatgaagcaactgtcaataagcttctttctcgtgctttgagaggggacgaggaaaagaatgtggaggttaagctgaaaactttcagccccgaactacaagggaaagcagtttttgtggttgtgaatgcttgttccagcaaggactacttgaacaacattgtcggcgtttgttttgttggacaagacgttactagtcagaaaatcgtaatggataagttcatcaacatacaaggagattacaaggctattgtacatagcccaaaccctctaatcccgccaatttttgctgctgacgagaacacgtgctgcctggaatggaacatggcgatggaaaagcttacgggttggtctcgcagtgaagtgattgggaaaatgattgtcggggaagtgtttgggagctgttgcatgctaaagggtcctgatgctttaaccaagttcatgattgtattgcataatgcgattggtggccaagatacggataagttccctttcccattctttgaccgcaatgggaagtttgttcaggctctattgactgcaaacaagcgggttagcctcgagggaaaggttattggggctttctgtttcttgcaaatcccgagccctgagctgcagcaagctttagcagtccaacggaggcaggacacagagtgtttcacgaaggcaaaagagttggcttatatttgtcaggtgataaagaatcctttgagcggtatgcgtttcgcaaactcattgttggaggccacagacttgaacgaggaccagaagcagttacttgaaacaagtgtttcttgcgagaaacagatctcaaggatcgtcggggacatggatcttgaaagcattgaagacggttcatttgtgctaaagagggaagagtttttccttggaagtgtcataaacgcgattgtaagtcaagcgatgttcttattaagggacagaggtcttcagctgatccgtgacattcccgaagagatcaaatcaatagaggtttttggagaccagataaggattcaacagctcctggctgagtttctgctgagtataatccggtatgcaccatctcaagagtgggtggagatccatttaagccaactttcaaagcaaatggctgatggattcgccgccatccgcacagaattcagaatggcgtgtccaggtgaaggtctgcctccagagctagtccgagacatgttccatagcagcaggtggacaagccctgaaggtttaggtctaagcgtatgtcgaaagattttaaagctaatgaacggtgaggttcaatacatccgagaatcagaacggtcctatttcctcatcattctggaactccctgtacctcgaaagcgaccattgtcaactgctagtggaagtggtgacatgatgctgatgatgccatattagatggtttccggagtcgggggtagtggcggtggccgtggcggtggccgtggcggagaagaagaaccgtcgtcaagtcacactcctaataaccgaagaggaggagaacaagctcaatcgtcgggaacgaaatctctcagaccaagaagcaacactgaatcaatgagcaaagcaattcaacagtacaccgtcgacgcaagactccacgccgttttcgaacaatccggcgaatcagggaaatcattcgactactcacaatcactcaaaacgacgacgtacggttcctctgtacctgagcaacagatcacagcttatctctctcgaatccagcgaggtggttacattcagcctttcggatgtatgatcgccgtcgatgaatccagtttccggatcatcggttacagtgaaaacgccagagaaatgttagggattatgcctcaatctgttcctactcttgagaaacctgagattctagctatgggaactgatgtgagatctttgttcacttcttcgagctcgattctactcgagcgtgctttcgttgctcgagagattaccttgttaaatccggtttggatccattccaagaatactggtaaaccgttttacgccattcttcataggattgatgttggtgttgttattgatttagagccagctagaactgaagatcctgcgctttctattgctggtgctgttcaatcgcagaaactcgcggttcgtgcgatttctcagttacaggctcttcctggtggagatattaagcttttgtgtgacactgtcgtggaaagtgtgagggacttgactggttatgatcgtgttatggtttataagtttcatgaagatgagcatggagaagttgtagctgagagtaaacgagatgatttagagccttatattggactgcatgttcctgctactgatattcctcaagcgtcaaggttcttgtttaagcagaaccgtgtccgaatgatagtagattgcaatgccacacctgttcttgtggtccaggacgataggctaactcagtctatgtgcttggttggttctactcttagggctcctcatggttgtcactctcagtatatggctaacatgggatctattgcgtctttagcaatggcggttataatcaatggaaatgaagatgatgggagcaatgtagctagtggaagaagctcgatgaggctttggggtttggttgtttgccatcacacttcttctcgctgcataccgtttccgctaaggtatgcttgtgagtttttgatgcaggctttcggtttacagttaaacatggaattgcagttagctttgcaaatgtcagagaaacgcgttttgagaacgcagacactgttatgtgatatgcttctgcgtgactcgcctgctggaattgttacacagagtcccagtatcatggacttagtgaaatgtgacggtgcagcatttctttaccacgggaagtattacccgttgggtgttgctcctagtgaagttcagataaaagatgttgtggagtggttgcttgcgaatcatgcggattcaaccggattaagcactgatagtttaggcgatgcggggtatcccggtgcagctgcgttaggggatgctgtgtgcggtatggcagttgcatatatcacaaaaagagactttcttttttggtttcgatctcacactgcgaaagaaatcaaatggggaggcgctaagcatcatccggaggataaagatgatgggcaacgaatgcatcctcgttcgtcctttcaggcttttcttgaagttgttaagagccggagtcagccatgggaaactgcggaaatggatgcgattcactcgctccagcttattctgagagactcttttaaagaatctgaggcggctatgaactctaaagttgtggatggtgtggttcagccatgtagggatatggcgggggaacaggggattgatgagttaggtgcagttgcaagagagatggttaggctcattgagactgcaactgttcctatattcgctgtggatgccggaggctgcatcaatggatggaacgctaagattgcagagttgacaggtctctcagttgaagaagctatggggaagtctctggtttctgatttaatatacaaagagaatgaagcaactgtcaataagcttctttctcgtgctttgagaggggacgaggaaaagaatgtggaggttaagctgaaaactttcagccccgaactacaagggaaagcagtttttgtggttgtgaatgcttgttccagcaaggactacttgaacaacattgtcggcgtttgttttgttggacaagacgttactagtcagaaaatcgtaatggataagttcatcaacatacaaggagattacaaggctattgtacatagcccaaaccctctaatcccgccaatttttgctgctgacgagaacacgtgctgcctggaatggaacatggcgatggaaaagcttacgggttggtctcgcagtgaagtgattgggaaaatgattgtcggggaagtgtttgggagctgttgcatgctaaagggtcctgatgctttaaccaagttcatgattgtattgcataatgcgattggtggccaagatacggataagttccctttcccattctttgaccgcaatgggaagtttgttcaggctctattgactgcaaacaagcgggttagcctcgagggaaaggttattggggctttctgtttcttgcaaatcccgagccctgagctgcagcaagctttagcagtccaacggaggcaggacacagagtgtttcacgaaggcaaaagagttggcttatatttgtcaggtgataaagaatcctttgagcggtatgcgtttcgcaaactcattgttggaggccacagacttgaacgaggaccagaagcagttacttgaaacaagtgtttcttgcgagaaacagatctcaaggatcgtcggggacatggatcttgaaagcattgaagacggttcatttgtgctaaagagggaagagtttttccttggaagtgtcataaacgcgattgtaagtcaagcgatgttcttattaagggacagaggtcttcagctgatccgtgacattcccgaagagatcaaatcaatagaggtttttggagaccagataaggattcaacagctcctggctgagtttctgctgagtataatccggtatgcaccatctcaagagtgggtggagatccatttaagccaactttcaaagcaaatggctgatggattcgccgccatccgcacagaattcagaatggcgtgtccaggtgaaggtctgcctccagagctagtccgagacatgttccatagcagcaggtggacaagccctgaaggtttaggtctaagcgtatgtcgaaagattttaaagctaatgaacggtgaggttcaatacatccgagaatcagaacggtcctatttcctcatcattctggaactccctgtacctcgaaagcgaccattgtcaactgctagtggaagtggtgacatgatgctgatgatgccatattagatggtttccggagtcgggggtagtggcggtggccgtggcggtggccgtggcggagaagaagaaccgtcgtcaagtcacactcctaataaccgaagaggaggagaacaagctcaatcgtcgggaacgaaatctctcagaccaagaagcaacactgaatcaatgagcaaagcaattcaacagtacaccgtcgacgcaagactccacgccgttttcgaacaatccggcgaatcagggaaatcattcgactactcacaatcactcaaaacgacgacgtacggttcctctgtacctgagcaacagatcacagcttatctctctcgaatccagcgaggtggttacattcagcctttcggatgtatgatcgccgtcgatgaatccagtttccggatcatcggttacagtgaaaacgccagagaaatgttagggattatgcctcaatctgttcctactcttgagaaacctgagattctagctatgggaactgatgtgagatctttgttcacttcttcgagctcgattctactcgagcgtgctttcgttgctcgagagattaccttgttaaatccggtttggatccattccaagaatactggtaaaccgttttacgccattcttcataggattgatgttggtgttgttattgatttagagccagctagaactgaagatcctgcgctttctattgctggtgctgttcaatcgcagaaactcgcggttcgtgcgatttctcagttacaggctcttcctggtggagatattaagcttttgtgtgacactgtcgtggaaagtgtgagggacttgactggttatgatcgtgttatggtttataagtttcatgaagatgagcatggagaagttgtagctgagagtaaacgagatgatttagagccttatattggactgcatgttcctgctactgatattcctcaagcgtcaaggttcttgtttaagcagaaccgtgtccgaatgatagtagattgcaatgccacacctgttcttgtggtccaggacgataggctaactcagtctatgtgcttggttggttctactcttagggctcctcatggttgtcactctcagtatatggctaacatgggatctattgcgtctttagcaatggcggttataatcaatggaaatgaagatgatgggagcaatgtagctagtggaagaagctcgatgaggctttggggtttggttgtttgccatcacacttcttctcgctgcataccgtttccgctaaggtatgcttgtgagtttttgatgcaggctttcggtttacagttaaacatggaattgcagttagctttgcaaatgtcagagaaacgcgttttgagaacgcagacactgttatgtgatatgcttctgcgtgactcgcctgctggaattgttacacagagtcccagtatcatggacttagtgaaatgtgacggtgcagcatttctttaccacgggaagtattacccgttgggtgttgctcctagtgaagttcagataaaagatgttgtggagtggttgcttgcgaatcatgcggattcaaccggattaagcactgatagtttaggcgatgcggggtatcccggtgcagctgcgttaggggatgctgtgtgcggtatggcagttgcatatatcacaaaaagagactttcttttttggtttcgatctcacactgcgaaagaaatcaaatggggaggcgctaagcatcatccggaggataaagatgatgggcaacgaatgcatcctcgttcgtcctttcaggcttttcttgaagttgttaagagccggagtcagccatgggaaactgcggaaatggatgcgattcactcgctccagcttattctgagagactcttttaaagaatctgaggcggctatgaactctaaagttgtggatggtgtggttcagccatgtagggatatggcgggggaacaggggattgatgagttaggtgcagttgcaagagagatggttaggctcattgagactgcaactgttcctatattcgctgtggatgccggaggctgcatcaatggatggaacgctaagattgcagagttgacaggtctctcagttgaagaagctatggggaagtctctggtttctgatttaatatacaaagagaatgaagcaactgtcaataagcttctttctcgtgctttgagaggggacgaggaaaagaatgtggaggttaagctgaaaactttcagccccgaactacaagggaaagcagtttttgtggttgtgaatgcttgttccagcaaggactacttgaacaacattgtcggcgtttgttttgttggacaagacgttactagtcagaaaatcgtaatggataagttcatcaacatacaaggagattacaaggctattgtacatagcccaaaccctctaatcccgccaatttttgctgctgacgagaacacgtgctgcctggaatggaacatggcgatggaaaagcttacgggttggtctcgcagtgaagtgattgggaaaatgattgtcggggaagtgtttgggagctgttgcatgctaaagggtcctgatgctttaaccaagttcatgattgtattgcataatgcgattggtggccaagatacggataagttccctttcccattctttgaccgcaatgggaagtttgttcaggctctattgactgcaaacaagcgggttagcctcgagggaaaggttattggggctttctgtttcttgcaaatcccgagccctgagctgcagcaagctttagcagtccaacggaggcaggacacagagtgtttcacgaaggcaaaagagttggcttatatttgtcaggtgataaagaatcctttgagcggtatgcgtttcgcaaactcattgttggaggccacagacttgaacgaggaccagaagcagttacttgaaacaagtgtttcttgcgagaaacagatctcaaggatcgtcggggacatggatcttgaaagcattgaagacggttcatttgtgctaaagagggaagagtttttccttggaagtgtcataaacgcgattgtaagtcaagcgatgttcttattaagggacagaggtcttcagctgatccgtgacattcccgaagagatcaaatcaatagaggtttttggagaccagataaggattcaacagctcctggctgagtttctgctgagtataatccggtatgcaccatctcaagagtgggtggagatccatttaagccaactttcaaagcaaatggctgatggattcgccgccatccgcacagaattcagaatggcgtgtccaggtgaaggtctgcctccagagctagtccgagacatgttccatagcagcaggtggacaagccctgaaggtttaggtctaagcgtatgtcgaaagattttaaagctaatgaacggtgaggttcaatacatccgagaatcagaacggtcctatttcctcatcattctggaactccctgtacctcgaaagcgaccattgtcaactgctagtggaagtggtgacatgatgctgatgatgccatattagatggtttccggagtcgggggtagtggcggtggccgtggcggtggccgtggcggagaagaagaaccgtcgtcaagtcacactcctaataaccgaagaggaggagaacaagctcaatcgtcgggaacgaaatctctcagaccaagaagcaacactgaatcaatgagcaaagcaattcaacagtacaccgtcgacgcaagactccacgccgttttcgaacaatccggcgaatcagggaaatcattcgactactcacaatcactcaaaacgacgacgtacggttcctctgtacctgagcaacagatcacagcttatctctctcgaatccagcgaggtggttacattcagcctttcggatgtatgatcgccgtcgatgaatccagtttccggatcatcggttacagtgaaaacgccagagaaatgttagggattatgcctcaatctgttcctactcttgagaaacctgagattctagctatgggaactgatgtgagatctttgttcacttcttcgagctcgattctactcgagcgtgctttcgttgctcgagagattaccttgttaaatccggtttggatccattccaagaatactggtaaaccgttttacgccattcttcataggattgatgttggtgttgttattgatttagagccagctagaactgaagatcctgcgctttctattgctggtgctgttcaatcgcagaaactcgcggttcgtgcgatttctcagttacaggctcttcctggtggagatattaagcttttgtgtgacactgtcgtggaaagtgtgagggacttgactggttatgatcgtgttatggtttataagtttcatgaagatgagcatggagaagttgtagctgagagtaaacgagatgatttagagccttatattggactgcatgttcctgctactgatattcctcaagcgtcaaggttcttgtttaagcagaaccgtgtccgaatgatagtagattgcaatgccacacctgttcttgtggtccaggacgataggctaactcagtctatgtgcttggttggttctactcttagggctcctcatggttgtcactctcagtatatggctaacatgggatctattgcgtctttagcaatggcggttataatcaatggaaatgaagatgatgggagcaatgtagctagtggaagaagctcgatgaggctttggggtttggttgtttgccatcacacttcttctcgctgcataccgtttccgctaaggtatgcttgtgagtttttgatgcaggctttcggtttacagttaaacatggaattgcagttagctttgcaaatgtcagagaaacgcgttttgagaacgcagacactgttatgtgatatgcttctgcgtgactcgcctgctggaattgttacacagagtcccagtatcatggacttagtgaaatgtgacggtgcagcatttctttaccacgggaagtattacccgttgggtgttgctcctagtgaagttcagataaaagatgttgtggagtggttgcttgcgaatcatgcggattcaaccggattaagcactgatagtttaggcgatgcggggtatcccggtgcagctgcgttaggggatgctgtgtgcggtatggcagttgcatatatcacaaaaagagactttcttttttggtttcgatctcacactgcgaaagaaatcaaatggggaggcgctaagcatcatccggaggataaagatgatgggcaacgaatgcatcctcgttcgtcctttcaggcttttcttgaagttgttaagagccggagtcagccatgggaaactgcggaaatggatgcgattcactcgctccagcttattctgagagactcttttaaagaatctgaggcggctatgaactctaaagttgtggatggtgtggttcagccatgtagggatatggcgggggaacaggggattgatgagttaggtgcagttgcaagagagatggttaggctcattgagactgcaactgttcctatattcgctgtggatgccggaggctgcatcaatggatggaacgctaagattgcagagttgacaggtctctcagttgaagaagctatggggaagtctctggtttctgatttaatatacaaagagaatgaagcaactgtcaataagcttctttctcgtgctttgagaggggacgaggaaaagaatgtggaggttaagctgaaaactttcagccccgaactacaagggaaagcagtttttgtggttgtgaatgcttgttccagcaaggactacttgaacaacattgtcggcgtttgttttgttggacaagacgttactagtcagaaaatcgtaatggataagttcatcaacatacaaggagattacaaggctattgtacatagcccaaaccctctaatcccgccaatttttgctgctgacgagaacacgtgctgcctggaatggaacatggcgatggaaaagcttacgggttggtctcgcagtgaagtgattgggaaaatgattgtcggggaagtgtttgggagctgttgcatgctaaagggtcctgatgctttaaccaagttcatgattgtattgcataatgcgattggtggccaagatacggataagttccctttcccattctttgaccgcaatgggaagtttgttcaggctctattgactgcaaacaagcgggttagcctcgagggaaaggttattggggctttctgtttcttgcaaatcccgagccctgagctgcagcaagctttagcagtccaacggaggcaggacacagagtgtttcacgaaggcaaaagagttggcttatatttgtcaggtgataaagaatcctttgagcggtatgcgtttcgcaaactcattgttggaggccacagacttgaacgaggaccagaagcagttacttgaaacaagtgtttcttgcgagaaacagatctcaaggatcgtcggggacatggatcttgaaagcattgaagacggttcatttgtgctaaagagggaagagtttttccttggaagtgtcataaacgcgattgtaagtcaagcgatgttcttattaagggacagaggtcttcagctgatccgtgacattcccgaagagatcaaatcaatagaggtttttggagaccagataaggattcaacagctcctggctgagtttctgctgagtataatccggtatgcaccatctcaagagtgggtggagatccatttaagccaactttcaaagcaaatggctgatggattcgccgccatccgcacagaattcagaatggcgtgtccaggtgaaggtctgcctccagagctagtccgagacatgttccatagcagcaggtggacaagccctgaaggtttaggtctaagcgtatgtcgaaagattttaaagctaatgaacggtgaggttcaatacatccgagaatcagaacggtcctatttcctcatcattctggaactccctgtacctcgaaagcgaccattgtcaactgctagtggaagtggtgacatgatgctgatgatgccatattagatggtttccggagtcgggggtagtggcggtggccgtggcggtggccgtggcggagaagaagaaccgtcgtcaagtcacactcctaataaccgaagaggaggagaacaagctcaatcgtcgggaacgaaatctctcagaccaagaagcaacactgaatcaatgagcaaagcaattcaacagtacaccgtcgacgcaagactccacgccgttttcgaacaatccggcgaatcagggaaatcattcgactactcacaatcactcaaaacgacgacgtacggttcctctgtacctgagcaacagatcacagcttatctctctcgaatccagcgaggtggttacattcagcctttcggatgtatgatcgccgtcgatgaatccagtttccggatcatcggttacagtgaaaacgccagagaaatgttagggattatgcctcaatctgttcctactcttgagaaacctgagattctagctatgggaactgatgtgagatctttgttcacttcttcgagctcgattctactcgagcgtgctttcgttgctcgagagattaccttgttaaatccggtttggatccattccaagaatactggtaaaccgttttacgccattcttcataggattgatgttggtgttgttattgatttagagccagctagaactgaagatcctgcgctttctattgctggtgctgttcaatcgcagaaactcgcggttcgtgcgatttctcagttacaggctcttcctggtggagatattaagcttttgtgtgacactgtcgtggaaagtgtgagggacttgactggttatgatcgtgttatggtttataagtttcatgaagatgagcatggagaagttgtagctgagagtaaacgagatgatttagagccttatattggactgcatgttcctgctactgatattcctcaagcgtcaaggttcttgtttaagcagaaccgtgtccgaatgatagtagattgcaatgccacacctgttcttgtggtccaggacgataggctaactcagtctatgtgcttggttggttctactcttagggctcctcatggttgtcactctcagtatatggctaacatgggatctattgcgtctttagcaatggcggttataatcaatggaaatgaagatgatgggagcaatgtagctagtggaagaagctcgatgaggctttggggtttggttgtttgccatcacacttcttctcgctgcataccgtttccgctaaggtatgcttgtgagtttttgatgcaggctttcggtttacagttaaacatggaattgcagttagctttgcaaatgtcagagaaacgcgttttgagaacgcagacactgttatgtgatatgcttctgcgtgactcgcctgctggaattgttacacagagtcccagtatcatggacttagtgaaatgtgacggtgcagcatttctttaccacgggaagtattacccgttgggtgttgctcctagtgaagttcagataaaagatgttgtggagtggttgcttgcgaatcatgcggattcaaccggattaagcactgatagtttaggcgatgcggggtatcccggtgcagctgcgttaggggatgctgtgtgcggtatggcagttgcatatatcacaaaaagagactttcttttttggtttcgatctcacactgcgaaagaaatcaaatggggaggcgctaagcatcatccggaggataaagatgatgggcaacgaatgcatcctcgttcgtcctttcaggcttttcttgaagttgttaagagccggagtcagccatgggaaactgcggaaatggatgcgattcactcgctccagcttattctgagagactcttttaaagaatctgaggcggctatgaactctaaagttgtggatggtgtggttcagccatgtagggatatggcgggggaacaggggattgatgagttaggtgcagttgcaagagagatggttaggctcattgagactgcaactgttcctatattcgctgtggatgccggaggctgcatcaatggatggaacgctaagattgcagagttgacaggtctctcagttgaagaagctatggggaagtctctggtttctgatttaatatacaaagagaatgaagcaactgtcaataagcttctttctcgtgctttgagaggggacgaggaaaagaatgtggaggttaagctgaaaactttcagccccgaactacaagggaaagcagtttttgtggttgtgaatgcttgttccagcaaggactacttgaacaacattgtcggcgtttgttttgttggacaagacgttactagtcagaaaatcgtaatggataagttcatcaacatacaaggagattacaaggctattgtacatagcccaaaccctctaatcccgccaatttttgctgctgacgagaacacgtgctgcctggaatggaacatggcgatggaaaagcttacgggttggtctcgcagtgaagtgattgggaaaatgattgtcggggaagtgtttgggagctgttgcatgctaaagggtcctgatgctttaaccaagttcatgattgtattgcataatgcgattggtggccaagatacggataagttccctttcccattctttgaccgcaatgggaagtttgttcaggctctattgactgcaaacaagcgggttagcctcgagggaaaggttattggggctttctgtttcttgcaaatcccgagccctgagctgcagcaagctttagcagtccaacggaggcaggacacagagtgtttcacgaaggcaaaagagttggcttatatttgtcaggtgataaagaatcctttgagcggtatgcgtttcgcaaactcattgttggaggccacagacttgaacgaggaccagaagcagttacttgaaacaagtgtttcttgcgagaaacagatctcaaggatcgtcggggacatggatcttgaaagcattgaagacggttcatttgtgctaaagagggaagagtttttccttggaagtgtcataaacgcgattgtaagtcaagcgatgttcttattaagggacagaggtcttcagctgatccgtgacattcccgaagagatcaaatcaatagaggtttttggagaccagataaggattcaacagctcctggctgagtttctgctgagtataatccggtatgcaccatctcaagagtgggtggagatccatttaagccaactttcaaagcaaatggctgatggattcgccgccatccgcacagaattcagaatggcgtgtccaggtgaaggtctgcctccagagctagtccgagacatgttccatagcagcaggtggacaagccctgaaggtttaggtctaagcgtatgtcgaaagattttaaagctaatgaacggtgaggttcaatacatccgagaatcagaacggtcctatttcctcatcattctggaactccctgtacctcgaaagcgaccattgtcaactgctagtggaagtggtgacatgatgctgatgatgccatattagatggtttccggagtcgggggtagtggcggtggccgtggcggtggccgtggcggagaagaagaaccgtcgtcaagtcacactcctaataaccgaagaggaggagaacaagctcaatcgtcgggaacgaaatctctcagaccaagaagcaacactgaatcaatgagcaaagcaattcaacagtacaccgtcgacgcaagactccacgccgttttcgaacaatccggcgaatcagggaaatcattcgactactcacaatcactcaaaacgacgacgtacggttcctctgtacctgagcaacagatcacagcttatctctctcgaatccagcgaggtggttacattcagcctttcggatgtatgatcgccgtcgatgaatccagtttccggatcatcggttacagtgaaaacgccagagaaatgttagggattatgcctcaatctgttcctactcttgagaaacctgagattctagctatgggaactgatgtgagatctttgttcacttcttcgagctcgattctactcgagcgtgctttcgttgctcgagagattaccttgttaaatccggtttggatccattccaagaatactggtaaaccgttttacgccattcttcataggattgatgttggtgttgttattgatttagagccagctagaactgaagatcctgcgctttctattgctggtgctgttcaatcgcagaaactcgcggttcgtgcgatttctcagttacaggctcttcctggtggagatattaagcttttgtgtgacactgtcgtggaaagtgtgagggacttgactggttatgatcgtgttatggtttataagtttcatgaagatgagcatggagaagttgtagctgagagtaaacgagatgatttagagccttatattggactgcatgttcctgctactgatattcctcaagcgtcaaggttcttgtttaagcagaaccgtgtccgaatgatagtagattgcaatgccacacctgttcttgtggtccaggacgataggctaactcagtctatgtgcttggttggttctactcttagggctcctcatggttgtcactctcagtatatggctaacatgggatctattgcgtctttagcaatggcggttataatcaatggaaatgaagatgatgggagcaatgtagctagtggaagaagctcgatgaggctttggggtttggttgtttgccatcacacttcttctcgctgcataccgtttccgctaaggtatgcttgtgagtttttgatgcaggctttcggtttacagttaaacatggaattgcagttagctttgcaaatgtcagagaaacgcgttttgagaacgcagacactgttatgtgatatgcttctgcgtgactcgcctgctggaattgttacacagagtcccagtatcatggacttagtgaaatgtgacggtgcagcatttctttaccacgggaagtattacccgttgggtgttgctcctagtgaagttcagataaaagatgttgtggagtggttgcttgcgaatcatgcggattcaaccggattaagcactgatagtttaggcgatgcggggtatcccggtgcagctgcgttaggggatgctgtgtgcggtatggcagttgcatatatcacaaaaagagactttcttttttggtttcgatctcacactgcgaaagaaatcaaatggggaggcgctaagcatcatccggaggataaagatgatgggcaacgaatgcatcctcgttcgtcctttcaggcttttcttgaagttgttaagagccggagtcagccatgggaaactgcggaaatggatgcgattcactcgctccagcttattctgagagactcttttaaagaatctgaggcggctatgaactctaaagttgtggatggtgtggttcagccatgtagggatatggcgggggaacaggggattgatgagttaggtgcagttgcaagagagatggttaggctcattgagactgcaactgttcctatattcgctgtggatgccggaggctgcatcaatggatggaacgctaagattgcagagttgacaggtctctcagttgaagaagctatggggaagtctctggtttctgatttaatatacaaagagaatgaagcaactgtcaataagcttctttctcgtgctttgagaggggacgaggaaaagaatgtggaggttaagctgaaaactttcagccccgaactacaagggaaagcagtttttgtggttgtgaatgcttgttccagcaaggactacttgaacaacattgtcggcgtttgttttgttggacaagacgttactagtcagaaaatcgtaatggataagttcatcaacatacaaggagattacaaggctattgtacatagcccaaaccctctaatcccgccaatttttgctgctgacgagaacacgtgctgcctggaatggaacatggcgatggaaaagcttacgggttggtctcgcagtgaagtgattgggaaaatgattgtcggggaagtgtttgggagctgttgcatgctaaagggtcctgatgctttaaccaagttcatgattgtattgcataatgcgattggtggccaagatacggataagttccctttcccattctttgaccgcaatgggaagtttgttcaggctctattgactgcaaacaagcgggttagcctcgagggaaaggttattggggctttctgtttcttgcaaatcccgagccctgagctgcagcaagctttagcagtccaacggaggcaggacacagagtgtttcacgaaggcaaaagagttggcttatatttgtcaggtgataaagaatcctttgagcggtatgcgtttcgcaaactcattgttggaggccacagacttgaacgaggaccagaagcagttacttgaaacaagtgtttcttgcgagaaacagatctcaaggatcgtcggggacatggatcttgaaagcattgaagacggttcatttgtgctaaagagggaagagtttttccttggaagtgtcataaacgcgattgtaagtcaagcgatgttcttattaagggacagaggtcttcagctgatccgtgacattcccgaagagatcaaatcaatagaggtttttggagaccagataaggattcaacagctcctggctgagtttctgctgagtataatccggtatgcaccatctcaagagtgggtggagatccatttaagccaactttcaaagcaaatggctgatggattcgccgccatccgcacagaattcagaatggcgtgtccaggtgaaggtctgcctccagagctagtccgagacatgttccatagcagcaggtggacaagccctgaaggtttaggtctaagcgtatgtcgaaagattttaaagctaatgaacggtgaggttcaatacatccgagaatcagaacggtcctatttcctcatcattctggaactccctgtacctcgaaagcgaccattgtcaactgctagtggaagtggtgacatgatgctgatgatgccatattagatggtttccggagtcgggggtagtggcggtggccgtggcggtggccgtggcggagaagaagaaccgtcgtcaagtcacactcctaataaccgaagaggaggagaacaagctcaatcgtcgggaacgaaatctctcagaccaagaagcaacactgaatcaatgagcaaagcaattcaacagtacaccgtcgacgcaagactccacgccgttttcgaacaatccggcgaatcagggaaatcattcgactactcacaatcactcaaaacgacgacgtacggttcctctgtacctgagcaacagatcacagcttatctctctcgaatccagcgaggtggttacattcagcctttcggatgtatgatcgccgtcgatgaatccagtttccggatcatcggttacagtgaaaacgccagagaaatgttagggattatgcctcaatctgttcctactcttgagaaacctgagattctagctatgggaactgatgtgagatctttgttcacttcttcgagctcgattctactcgagcgtgctttcgttgctcgagagattaccttgttaaatccggtttggatccattccaagaatactggtaaaccgttttacgccattcttcataggattgatgttggtgttgttattgatttagagccagctagaactgaagatcctgcgctttctattgctggtgctgttcaatcgcagaaactcgcggttcgtgcgatttctcagttacaggctcttcctggtggagatattaagcttttgtgtgacactgtcgtggaaagtgtgagggacttgactggttatgatcgtgttatggtttataagtttcatgaagatgagcatggagaagttgtagctgagagtaaacgagatgatttagagccttatattggactgcatgttcctgctactgatattcctcaagcgtcaaggttcttgtttaagcagaaccgtgtccgaatgatagtagattgcaatgccacacctgttcttgtggtccaggacgataggctaactcagtctatgtgcttggttggttctactcttagggctcctcatggttgtcactctcagtatatggctaacatgggatctattgcgtctttagcaatggcggttataatcaatggaaatgaagatgatgggagcaatgtagctagtggaagaagctcgatgaggctttggggtttggttgtttgccatcacacttcttctcgctgcataccgtttccgctaaggtatgcttgtgagtttttgatgcaggctttcggtttacagttaaacatggaattgcagttagctttgcaaatgtcagagaaacgcgttttgagaacgcagacactgttatgtgatatgcttctgcgtgactcgcctgctggaattgttacacagagtcccagtatcatggacttagtgaaatgtgacggtgcagcatttctttaccacgggaagtattacccgttgggtgttgctcctagtgaagttcagataaaagatgttgtggagtggttgcttgcgaatcatgcggattcaaccggattaagcactgatagtttaggcgatgcggggtatcccggtgcagctgcgttaggggatgctgtgtgcggtatggcagttgcatatatcacaaaaagagactttcttttttggtttcgatctcacactgcgaaagaaatcaaatggggaggcgctaagcatcatccggaggataaagatgatgggcaacgaatgcatcctcgttcgtcctttcaggcttttcttgaagttgttaagagccggagtcagccatgggaaactgcggaaatggatgcgattcactcgctccagcttattctgagagactcttttaaagaatctgaggcggctatgaactctaaagttgtggatggtgtggttcagccatgtagggatatggcgggggaacaggggattgatgagttaggtgcagttgcaagagagatggttaggctcattgagactgcaactgttcctatattcgctgtggatgccggaggctgcatcaatggatggaacgctaagattgcagagttgacaggtctctcagttgaagaagctatggggaagtctctggtttctgatttaatatacaaagagaatgaagcaactgtcaataagcttctttctcgtgctttgagaggggacgaggaaaagaatgtggaggttaagctgaaaactttcagccccgaactacaagggaaagcagtttttgtggttgtgaatgcttgttccagcaaggactacttgaacaacattgtcggcgtttgttttgttggacaagacgttactagtcagaaaatcgtaatggataagttcatcaacatacaaggagattacaaggctattgtacatagcccaaaccctctaatcccgccaatttttgctgctgacgagaacacgtgctgcctggaatggaacatggcgatggaaaagcttacgggttggtctcgcagtgaagtgattgggaaaatgattgtcggggaagtgtttgggagctgttgcatgctaaagggtcctgatgctttaaccaagttcatgattgtattgcataatgcgattggtggccaagatacggataagttccctttcccattctttgaccgcaatgggaagtttgttcaggctctattgactgcaaacaagcgggttagcctcgagggaaaggttattggggctttctgtttcttgcaaatcccgagccctgagctgcagcaagctttagcagtccaacggaggcaggacacagagtgtttcacgaaggcaaaagagttggcttatatttgtcaggtgataaagaatcctttgagcggtatgcgtttcgcaaactcattgttggaggccacagacttgaacgaggaccagaagcagttacttgaaacaagtgtttcttgcgagaaacagatctcaaggatcgtcggggacatggatcttgaaagcattgaagacggttcatttgtgctaaagagggaagagtttttccttggaagtgtcataaacgcgattgtaagtcaagcgatgttcttattaagggacagaggtcttcagctgatccgtgacattcccgaagagatcaaatcaatagaggtttttggagaccagataaggattcaacagctcctggctgagtttctgctgagtataatccggtatgcaccatctcaagagtgggtggagatccatttaagccaactttcaaagcaaatggctgatggattcgccgccatccgcacagaattcagaatggcgtgtccaggtgaaggtctgcctccagagctagtccgagacatgttccatagcagcaggtggacaagccctgaaggtttaggtctaagcgtatgtcgaaagattttaaagctaatgaacggtgaggttcaatacatccgagaatcagaacggtcctatttcctcatcattctggaactccctgtacctcgaaagcgaccattgtcaactgctagtggaagtggtgacatgatgctgatgatgccatattagatggtttccggagtcgggggtagtggcggtggccgtggcggtggccgtggcggagaagaagaaccgtcgtcaagtcacactcctaataaccgaagaggaggagaacaagctcaatcgtcgggaacgaaatctctcagaccaagaagcaacactgaatcaatgagcaaagcaattcaacagtacaccgtcgacgcaagactccacgccgttttcgaacaatccggcgaatcagggaaatcattcgactactcacaatcactcaaaacgacgacgtacggttcctctgtacctgagcaacagatcacagcttatctctctcgaatccagcgaggtggttacattcagcctttcggatgtatgatcgccgtcgatgaatccagtttccggatcatcggttacagtgaaaacgccagagaaatgttagggattatgcctcaatctgttcctactcttgagaaacctgagattctagctatgggaactgatgtgagatctttgttcacttcttcgagctcgattctactcgagcgtgctttcgttgctcgagagattaccttgttaaatccggtttggatccattccaagaatactggtaaaccgttttacgccattcttcataggattgatgttggtgttgttattgatttagagccagctagaactgaagatcctgcgctttctattgctggtgctgttcaatcgcagaaactcgcggttcgtgcgatttctcagttacaggctcttcctggtggagatattaagcttttgtgtgacactgtcgtggaaagtgtgagggacttgactggttatgatcgtgttatggtttataagtttcatgaagatgagcatggagaagttgtagctgagagtaaacgagatgatttagagccttatattggactgcatgttcctgctactgatattcctcaagcgtcaaggttcttgtttaagcagaaccgtgtccgaatgatagtagattgcaatgccacacctgttcttgtggtccaggacgataggctaactcagtctatgtgcttggttggttctactcttagggctcctcatggttgtcactctcagtatatggctaacatgggatctattgcgtctttagcaatggcggttataatcaatggaaatgaagatgatgggagcaatgtagctagtggaagaagctcgatgaggctttggggtttggttgtttgccatcacacttcttctcgctgcataccgtttccgctaaggtatgcttgtgagtttttgatgcaggctttcggtttacagttaaacatggaattgcagttagctttgcaaatgtcagagaaacgcgttttgagaacgcagacactgttatgtgatatgcttctgcgtgactcgcctgctggaattgttacacagagtcccagtatcatggacttagtgaaatgtgacggtgcagcatttctttaccacgggaagtattacccgttgggtgttgctcctagtgaagttcagataaaagatgttgtggagtggttgcttgcgaatcatgcggattcaaccggattaagcactgatagtttaggcgatgcggggtatcccggtgcagctgcgttaggggatgctgtgtgcggtatggcagttgcatatatcacaaaaagagactttcttttttggtttcgatctcacactgcgaaagaaatcaaatggggaggcgctaagcatcatccggaggataaagatgatgggcaacgaatgcatcctcgttcgtcctttcaggcttttcttgaagttgttaagagccggagtcagccatgggaaactgcggaaatggatgcgattcactcgctccagcttattctgagagactcttttaaagaatctgaggcggctatgaactctaaagttgtggatggtgtggttcagccatgtagggatatggcgggggaacaggggattgatgagttaggtgcagttgcaagagagatggttaggctcattgagactgcaactgttcctatattcgctgtggatgccggaggctgcatcaatggatggaacgctaagattgcagagttgacaggtctctcagttgaagaagctatggggaagtctctggtttctgatttaatatacaaagagaatgaagcaactgtcaataagcttctttctcgtgctttgagaggggacgaggaaaagaatgtggaggttaagctgaaaactttcagccccgaactacaagggaaagcagtttttgtggttgtgaatgcttgttccagcaaggactacttgaacaacattgtcggcgtttgttttgttggacaagacgttactagtcagaaaatcgtaatggataagttcatcaacatacaaggagattacaaggctattgtacatagcccaaaccctctaatcccgccaatttttgctgctgacgagaacacgtgctgcctggaatggaacatggcgatggaaaagcttacgggttggtctcgcagtgaagtgattgggaaaatgattgtcggggaagtgtttgggagctgttgcatgctaaagggtcctgatgctttaaccaagttcatgattgtattgcataatgcgattggtggccaagatacggataagttccctttcccattctttgaccgcaatgggaagtttgttcaggctctattgactgcaaacaagcgggttagcctcgagggaaaggttattggggctttctgtttcttgcaaatcccgagccctgagctgcagcaagctttagcagtccaacggaggcaggacacagagtgtttcacgaaggcaaaagagttggcttatatttgtcaggtgataaagaatcctttgagcggtatgcgtttcgcaaactcattgttggaggccacagacttgaacgaggaccagaagcagttacttgaaacaagtgtttcttgcgagaaacagatctcaaggatcgtcggggacatggatcttgaaagcattgaagacggttcatttgtgctaaagagggaagagtttttccttggaagtgtcataaacgcgattgtaagtcaagcgatgttcttattaagggacagaggtcttcagctgatccgtgacattcccgaagagatcaaatcaatagaggtttttggagaccagataaggattcaacagctcctggctgagtttctgctgagtataatccggtatgcaccatctcaagagtgggtggagatccatttaagccaactttcaaagcaaatggctgatggattcgccgccatccgcacagaattcagaatggcgtgtccaggtgaaggtctgcctccagagctagtccgagacatgttccatagcagcaggtggacaagccctgaaggtttaggtctaagcgtatgtcgaaagattttaaagctaatgaacggtgaggttcaatacatccgagaatcagaacggtcctatttcctcatcattctggaactccctgtacctcgaaagcgaccattgtcaactgctagtggaagtggtgacatgatgctgatgatgccatattagatggtttccggagtcgggggtagtggcggtggccgtggcggtggccgtggcggagaagaagaaccgtcgtcaagtcacactcctaataaccgaagaggaggagaacaagctcaatcgtcgggaacgaaatctctcagaccaagaagcaacactgaatcaatgagcaaagcaattcaacagtacaccgtcgacgcaagactccacgccgttttcgaacaatccggcgaatcagggaaatcattcgactactcacaatcactcaaaacgacgacgtacggttcctctgtacctgagcaacagatcacagcttatctctctcgaatccagcgaggtggttacattcagcctttcggatgtatgatcgccgtcgatgaatccagtttccggatcatcggttacagtgaaaacgccagagaaatgttagggattatgcctcaatctgttcctactcttgagaaacctgagattctagctatgggaactgatgtgagatctttgttcacttcttcgagctcgattctactcgagcgtgctttcgttgctcgagagattaccttgttaaatccggtttggatccattccaagaatactggtaaaccgttttacgccattcttcataggattgatgttggtgttgttattgatttagagccagctagaactgaagatcctgcgctttctattgctggtgctgttcaatcgcagaaactcgcggttcgtgcgatttctcagttacaggctcttcctggtggagatattaagcttttgtgtgacactgtcgtggaaagtgtgagggacttgactggttatgatcgtgttatggtttataagtttcatgaagatgagcatggagaagttgtagctgagagtaaacgagatgatttagagccttatattggactgcatgttcctgctactgatattcctcaagcgtcaaggttcttgtttaagcagaaccgtgtccgaatgatagtagattgcaatgccacacctgttcttgtggtccaggacgataggctaactcagtctatgtgcttggttggttctactcttagggctcctcatggttgtcactctcagtatatggctaacatgggatctattgcgtctttagcaatggcggttataatcaatggaaatgaagatgatgggagcaatgtagctagtggaagaagctcgatgaggctttggggtttggttgtttgccatcacacttcttctcgctgcataccgtttccgctaaggtatgcttgtgagtttttgatgcaggctttcggtttacagttaaacatggaattgcagttagctttgcaaatgtcagagaaacgcgttttgagaacgcagacactgttatgtgatatgcttctgcgtgactcgcctgctggaattgttacacagagtcccagtatcatggacttagtgaaatgtgacggtgcagcatttctttaccacgggaagtattacccgttgggtgttgctcctagtgaagttcagataaaagatgttgtggagtggttgcttgcgaatcatgcggattcaaccggattaagcactgatagtttaggcgatgcggggtatcccggtgcagctgcgttaggggatgctgtgtgcggtatggcagttgcatatatcacaaaaagagactttcttttttggtttcgatctcacactgcgaaagaaatcaaatggggaggcgctaagcatcatccggaggataaagatgatgggcaacgaatgcatcctcgttcgtcctttcaggcttttcttgaagttgttaagagccggagtcagccatgggaaactgcggaaatggatgcgattcactcgctccagcttattctgagagactcttttaaagaatctgaggcggctatgaactctaaagttgtggatggtgtggttcagccatgtagggatatggcgggggaacaggggattgatgagttaggtgcagttgcaagagagatggttaggctcattgagactgcaactgttcctatattcgctgtggatgccggaggctgcatcaatggatggaacgctaagattgcagagttgacaggtctctcagttgaagaagctatggggaagtctctggtttctgatttaatatacaaagagaatgaagcaactgtcaataagcttctttctcgtgctttgagaggggacgaggaaaagaatgtggaggttaagctgaaaactttcagccccgaactacaagggaaagcagtttttgtggttgtgaatgcttgttccagcaaggactacttgaacaacattgtcggcgtttgttttgttggacaagacgttactagtcagaaaatcgtaatggataagttcatcaacatacaaggagattacaaggctattgtacatagcccaaaccctctaatcccgccaatttttgctgctgacgagaacacgtgctgcctggaatggaacatggcgatggaaaagcttacgggttggtctcgcagtgaagtgattgggaaaatgattgtcggggaagtgtttgggagctgttgcatgctaaagggtcctgatgctttaaccaagttcatgattgtattgcataatgcgattggtggccaagatacggataagttccctttcccattctttgaccgcaatgggaagtttgttcaggctctattgactgcaaacaagcgggttagcctcgagggaaaggttattggggctttctgtttcttgcaaatcccgagccctgagctgcagcaagctttagcagtccaacggaggcaggacacagagtgtttcacgaaggcaaaagagttggcttatatttgtcaggtgataaagaatcctttgagcggtatgcgtttcgcaaactcattgttggaggccacagacttgaacgaggaccagaagcagttacttgaaacaagtgtttcttgcgagaaacagatctcaaggatcgtcggggacatggatcttgaaagcattgaagacggttcatttgtgctaaagagggaagagtttttccttggaagtgtcataaacgcgattgtaagtcaagcgatgttcttattaagggacagaggtcttcagctgatccgtgacattcccgaagagatcaaatcaatagaggtttttggagaccagataaggattcaacagctcctggctgagtttctgctgagtataatccggtatgcaccatctcaagagtgggtggagatccatttaagccaactttcaaagcaaatggctgatggattcgccgccatccgcacagaattcagaatggcgtgtccaggtgaaggtctgcctccagagctagtccgagacatgttccatagcagcaggtggacaagccctgaaggtttaggtctaagcgtatgtcgaaagattttaaagctaatgaacggtgaggttcaatacatccgagaatcagaacggtcctatttcctcatcattctggaactccctgtacctcgaaagcgaccattgtcaactgctagtggaagtggtgacatgatgctgatgatgccatattagatggtttccggagtcgggggtagtggcggtggccgtggcggtggccgtggcggagaagaagaaccgtcgtcaagtcacactcctaataaccgaagaggaggagaacaagctcaatcgtcgggaacgaaatctctcagaccaagaagcaacactgaatcaatgagcaaagcaattcaacagtacaccgtcgacgcaagactccacgccgttttcgaacaatccggcgaatcagggaaatcattcgactactcacaatcactcaaaacgacgacgtacggttcctctgtacctgagcaacagatcacagcttatctctctcgaatccagcgaggtggttacattcagcctttcggatgtatgatcgccgtcgatgaatccagtttccggatcatcggttacagtgaaaacgccagagaaatgttagggattatgcctcaatctgttcctactcttgagaaacctgagattctagctatgggaactgatgtgagatctttgttcacttcttcgagctcgattctactcgagcgtgctttcgttgctcgagagattaccttgttaaatccggtttggatccattccaagaatactggtaaaccgttttacgccattcttcataggattgatgttggtgttgttattgatttagagccagctagaactgaagatcctgcgctttctattgctggtgctgttcaatcgcagaaactcgcggttcgtgcgatttctcagttacaggctcttcctggtggagatattaagcttttgtgtgacactgtcgtggaaagtgtgagggacttgactggttatgatcgtgttatggtttataagtttcatgaagatgagcatggagaagttgtagctgagagtaaacgagatgatttagagccttatattggactgcatgttcctgctactgatattcctcaagcgtcaaggttcttgtttaagcagaaccgtgtccgaatgatagtagattgcaatgccacacctgttcttgtggtccaggacgataggctaactcagtctatgtgcttggttggttctactcttagggctcctcatggttgtcactctcagtatatggctaacatgggatctattgcgtctttagcaatggcggttataatcaatggaaatgaagatgatgggagcaatgtagctagtggaagaagctcgatgaggctttggggtttggttgtttgccatcacacttcttctcgctgcataccgtttccgctaaggtatgcttgtgagtttttgatgcaggctttcggtttacagttaaacatggaattgcagttagctttgcaaatgtcagagaaacgcgttttgagaacgcagacactgttatgtgatatgcttctgcgtgactcgcctgctggaattgttacacagagtcccagtatcatggacttagtgaaatgtgacggtgcagcatttctttaccacgggaagtattacccgttgggtgttgctcctagtgaagttcagataaaagatgttgtggagtggttgcttgcgaatcatgcggattcaaccggattaagcactgatagtttaggcgatgcggggtatcccggtgcagctgcgttaggggatgctgtgtgcggtatggcagttgcatatatcacaaaaagagactttcttttttggtttcgatctcacactgcgaaagaaatcaaatggggaggcgctaagcatcatccggaggataaagatgatgggcaacgaatgcatcctcgttcgtcctttcaggcttttcttgaagttgttaagagccggagtcagccatgggaaactgcggaaatggatgcgattcactcgctccagcttattctgagagactcttttaaagaatctgaggcggctatgaactctaaagttgtggatggtgtggttcagccatgtagggatatggcgggggaacaggggattgatgagttaggtgcagttgcaagagagatggttaggctcattgagactgcaactgttcctatattcgctgtggatgccggaggctgcatcaatggatggaacgctaagattgcagagttgacaggtctctcagttgaagaagctatggggaagtctctggtttctgatttaatatacaaagagaatgaagcaactgtcaataagcttctttctcgtgctttgagaggggacgaggaaaagaatgtggaggttaagctgaaaactttcagccccgaactacaagggaaagcagtttttgtggttgtgaatgcttgttccagcaaggactacttgaacaacattgtcggcgtttgttttgttggacaagacgttactagtcagaaaatcgtaatggataagttcatcaacatacaaggagattacaaggctattgtacatagcccaaaccctctaatcccgccaatttttgctgctgacgagaacacgtgctgcctggaatggaacatggcgatggaaaagcttacgggttggtctcgcagtgaagtgattgggaaaatgattgtcggggaagtgtttgggagctgttgcatgctaaagggtcctgatgctttaaccaagttcatgattgtattgcataatgcgattggtggccaagatacggataagttccctttcccattctttgaccgcaatgggaagtttgttcaggctctattgactgcaaacaagcgggttagcctcgagggaaaggttattggggctttctgtttcttgcaaatcccgagccctgagctgcagcaagctttagcagtccaacggaggcaggacacagagtgtttcacgaaggcaaaagagttggcttatatttgtcaggtgataaagaatcctttgagcggtatgcgtttcgcaaactcattgttggaggccacagacttgaacgaggaccagaagcagttacttgaaacaagtgtttcttgcgagaaacagatctcaaggatcgtcggggacatggatcttgaaagcattgaagacggttcatttgtgctaaagagggaagagtttttccttggaagtgtcataaacgcgattgtaagtcaagcgatgttcttattaagggacagaggtcttcagctgatccgtgacattcccgaagagatcaaatcaatagaggtttttggagaccagataaggattcaacagctcctggctgagtttctgctgagtataatccggtatgcaccatctcaagagtgggtggagatccatttaagccaactttcaaagcaaatggctgatggattcgccgccatccgcacagaattcagaatggcgtgtccaggtgaaggtctgcctccagagctagtccgagacatgttccatagcagcaggtggacaagccctgaaggtttaggtctaagcgtatgtcgaaagattttaaagctaatgaacggtgaggttcaatacatccgagaatcagaacggtcctatttcctcatcattctggaactccctgtacctcgaaagcgaccattgtcaactgctagtggaagtggtgacatgatgctgatgatgccatattagatggtttccggagtcgggggtagtggcggtggccgtggcggtggccgtggcggagaagaagaaccgtcgtcaagtcacactcctaataaccgaagaggaggagaacaagctcaatcgtcgggaacgaaatctctcagaccaagaagcaacactgaatcaatgagcaaagcaattcaacagtacaccgtcgacgcaagactccacgccgttttcgaacaatccggcgaatcagggaaatcattcgactactcacaatcactcaaaacgacgacgtacggttcctctgtacctgagcaacagatcacagcttatctctctcgaatccagcgaggtggttacattcagcctttcggatgtatgatcgccgtcgatgaatccagtttccggatcatcggttacagtgaaaacgccagagaaatgttagggattatgcctcaatctgttcctactcttgagaaacctgagattctagctatgggaactgatgtgagatctttgttcacttcttcgagctcgattctactcgagcgtgctttcgttgctcgagagattaccttgttaaatccggtttggatccattccaagaatactggtaaaccgttttacgccattcttcataggattgatgttggtgttgttattgatttagagccagctagaactgaagatcctgcgctttctattgctggtgctgttcaatcgcagaaactcgcggttcgtgcgatttctcagttacaggctcttcctggtggagatattaagcttttgtgtgacactgtcgtggaaagtgtgagggacttgactggttatgatcgtgttatggtttataagtttcatgaagatgagcatggagaagttgtagctgagagtaaacgagatgatttagagccttatattggactgcatgttcctgctactgatattcctcaagcgtcaaggttcttgtttaagcagaaccgtgtccgaatgatagtagattgcaatgccacacctgttcttgtggtccaggacgataggctaactcagtctatgtgcttggttggttctactcttagggctcctcatggttgtcactctcagtatatggctaacatgggatctattgcgtctttagcaatggcggttataatcaatggaaatgaagatgatgggagcaatgtagctagtggaagaagctcgatgaggctttggggtttggttgtttgccatcacacttcttctcgctgcataccgtttccgctaaggtatgcttgtgagtttttgatgcaggctttcggtttacagttaaacatggaattgcagttagctttgcaaatgtcagagaaacgcgttttgagaacgcagacactgttatgtgatatgcttctgcgtgactcgcctgctggaattgttacacagagtcccagtatcatggacttagtgaaatgtgacggtgcagcatttctttaccacgggaagtattacccgttgggtgttgctcctagtgaagttcagataaaagatgttgtggagtggttgcttgcgaatcatgcggattcaaccggattaagcactgatagtttaggcgatgcggggtatcccggtgcagctgcgttaggggatgctgtgtgcggtatggcagttgcatatatcacaaaaagagactttcttttttggtttcgatctcacactgcgaaagaaatcaaatggggaggcgctaagcatcatccggaggataaagatgatgggcaacgaatgcatcctcgttcgtcctttcaggcttttcttgaagttgttaagagccggagtcagccatgggaaactgcggaaatggatgcgattcactcgctccagcttattctgagagactcttttaaagaatctgaggcggctatgaactctaaagttgtggatggtgtggttcagccatgtagggatatggcgggggaacaggggattgatgagttaggtgcagttgcaagagagatggttaggctcattgagactgcaactgttcctatattcgctgtggatgccggaggctgcatcaatggatggaacgctaagattgcagagttgacaggtctctcagttgaagaagctatggggaagtctctggtttctgatttaatatacaaagagaatgaagcaactgtcaataagcttctttctcgtgctttgagaggggacgaggaaaagaatgtggaggttaagctgaaaactttcagccccgaactacaagggaaagcagtttttgtggttgtgaatgcttgttccagcaaggactacttgaacaacattgtcggcgtttgttttgttggacaagacgttactagtcagaaaatcgtaatggataagttcatcaacatacaaggagattacaaggctattgtacatagcccaaaccctctaatcccgccaatttttgctgctgacgagaacacgtgctgcctggaatggaacatggcgatggaaaagcttacgggttggtctcgcagtgaagtgattgggaaaatgattgtcggggaagtgtttgggagctgttgcatgctaaagggtcctgatgctttaaccaagttcatgattgtattgcataatgcgattggtggccaagatacggataagttccctttcccattctttgaccgcaatgggaagtttgttcaggctctattgactgcaaacaagcgggttagcctcgagggaaaggttattggggctttctgtttcttgcaaatcccgagccctgagctgcagcaagctttagcagtccaacggaggcaggacacagagtgtttcacgaaggcaaaagagttggcttatatttgtcaggtgataaagaatcctttgagcggtatgcgtttcgcaaactcattgttggaggccacagacttgaacgaggaccagaagcagttacttgaaacaagtgtttcttgcgagaaacagatctcaaggatcgtcggggacatggatcttgaaagcattgaagacggttcatttgtgctaaagagggaagagtttttccttggaagtgtcataaacgcgattgtaagtcaagcgatgttcttattaagggacagaggtcttcagctgatccgtgacattcccgaagagatcaaatcaatagaggtttttggagaccagataaggattcaacagctcctggctgagtttctgctgagtataatccggtatgcaccatctcaagagtgggtggagatccatttaagccaactttcaaagcaaatggctgatggattcgccgccatccgcacagaattcagaatggcgtgtccaggtgaaggtctgcctccagagctagtccgagacatgttccatagcagcaggtggacaagccctgaaggtttaggtctaagcgtatgtcgaaagattttaaagctaatgaacggtgaggttcaatacatccgagaatcagaacggtcctatttcctcatcattctggaactccctgtacctcgaaagcgaccattgtcaactgctagtggaagtggtgacatgatgctgatgatgccatattagatggtttccggagtcgggggtagtggcggtggccgtggcggtggccgtggcggagaagaagaaccgtcgtcaagtcacactcctaataaccgaagaggaggagaacaagctcaatcgtcgggaacgaaatctctcagaccaagaagcaacactgaatcaatgagcaaagcaattcaacagtacaccgtcgacgcaagactccacgccgttttcgaacaatccggcgaatcagggaaatcattcgactactcacaatcactcaaaacgacgacgtacggttcctctgtacctgagcaacagatcacagcttatctctctcgaatccagcgaggtggttacattcagcctttcggatgtatgatcgccgtcgatgaatccagtttccggatcatcggttacagtgaaaacgccagagaaatgttagggattatgcctcaatctgttcctactcttgagaaacctgagattctagctatgggaactgatgtgagatctttgttcacttcttcgagctcgattctactcgagcgtgctttcgttgctcgagagattaccttgttaaatccggtttggatccattccaagaatactggtaaaccgttttacgccattcttcataggattgatgttggtgttgttattgatttagagccagctagaactgaagatcctgcgctttctattgctggtgctgttcaatcgcagaaactcgcggttcgtgcgatttctcagttacaggctcttcctggtggagatattaagcttttgtgtgacactgtcgtggaaagtgtgagggacttgactggttatgatcgtgttatggtttataagtttcatgaagatgagcatggagaagttgtagctgagagtaaacgagatgatttagagccttatattggactgcatgttcctgctactgatattcctcaagcgtcaaggttcttgtttaagcagaaccgtgtccgaatgatagtagattgcaatgccacacctgttcttgtggtccaggacgataggctaactcagtctatgtgcttggttggttctactcttagggctcctcatggttgtcactctcagtatatggctaacatgggatctattgcgtctttagcaatggcggttataatcaatggaaatgaagatgatgggagcaatgtagctagtggaagaagctcgatgaggctttggggtttggttgtttgccatcacacttcttctcgctgcataccgtttccgctaaggtatgcttgtgagtttttgatgcaggctttcggtttacagttaaacatggaattgcagttagctttgcaaatgtcagagaaacgcgttttgagaacgcagacactgttatgtgatatgcttctgcgtgactcgcctgctggaattgttacacagagtcccagtatcatggacttagtgaaatgtgacggtgcagcatttctttaccacgggaagtattacccgttgggtgttgctcctagtgaagttcagataaaagatgttgtggagtggttgcttgcgaatcatgcggattcaaccggattaagcactgatagtttaggcgatgcggggtatcccggtgcagctgcgttaggggatgctgtgtgcggtatggcagttgcatatatcacaaaaagagactttcttttttggtttcgatctcacactgcgaaagaaatcaaatggggaggcgctaagcatcatccggaggataaagatgatgggcaacgaatgcatcctcgttcgtcctttcaggcttttcttgaagttgttaagagccggagtcagccatgggaaactgcggaaatggatgcgattcactcgctccagcttattctgagagactcttttaaagaatctgaggcggctatgaactctaaagttgtggatggtgtggttcagccatgtagggatatggcgggggaacaggggattgatgagttaggtgcagttgcaagagagatggttaggctcattgagactgcaactgttcctatattcgctgtggatgccggaggctgcatcaatggatggaacgctaagattgcagagttgacaggtctctcagttgaagaagctatggggaagtctctggtttctgatttaatatacaaagagaatgaagcaactgtcaataagcttctttctcgtgctttgagaggggacgaggaaaagaatgtggaggttaagctgaaaactttcagccccgaactacaagggaaagcagtttttgtggttgtgaatgcttgttccagcaaggactacttgaacaacattgtcggcgtttgttttgttggacaagacgttactagtcagaaaatcgtaatggataagttcatcaacatacaaggagattacaaggctattgtacatagcccaaaccctctaatcccgccaatttttgctgctgacgagaacacgtgctgcctggaatggaacatggcgatggaaaagcttacgggttggtctcgcagtgaagtgattgggaaaatgattgtcggggaagtgtttgggagctgttgcatgctaaagggtcctgatgctttaaccaagttcatgattgtattgcataatgcgattggtggccaagatacggataagttccctttcccattctttgaccgcaatgggaagtttgttcaggctctattgactgcaaacaagcgggttagcctcgagggaaaggttattggggctttctgtttcttgcaaatcccgagccctgagctgcagcaagctttagcagtccaacggaggcaggacacagagtgtttcacgaaggcaaaagagttggcttatatttgtcaggtgataaagaatcctttgagcggtatgcgtttcgcaaactcattgttggaggccacagacttgaacgaggaccagaagcagttacttgaaacaagtgtttcttgcgagaaacagatctcaaggatcgtcggggacatggatcttgaaagcattgaagacggttcatttgtgctaaagagggaagagtttttccttggaagtgtcataaacgcgattgtaagtcaagcgatgttcttattaagggacagaggtcttcagctgatccgtgacattcccgaagagatcaaatcaatagaggtttttggagaccagataaggattcaacagctcctggctgagtttctgctgagtataatccggtatgcaccatctcaagagtgggtggagatccatttaagccaactttcaaagcaaatggctgatggattcgccgccatccgcacagaattcagaatggcgtgtccaggtgaaggtctgcctccagagctagtccgagacatgttccatagcagcaggtggacaagccctgaaggtttaggtctaagcgtatgtcgaaagattttaaagctaatgaacggtgaggttcaatacatccgagaatcagaacggtcctatttcctcatcattctggaactccctgtacctcgaaagcgaccattgtcaactgctagtggaagtggtgacatgatgctgatgatgccatattagatggtttccggagtcgggggtagtggcggtggccgtggcggtggccgtggcggagaagaagaaccgtcgtcaagtcacactcctaataaccgaagaggaggagaacaagctcaatcgtcgggaacgaaatctctcagaccaagaagcaacactgaatcaatgagcaaagcaattcaacagtacaccgtcgacgcaagactccacgccgttttcgaacaatccggcgaatcagggaaatcattcgactactcacaatcactcaaaacgacgacgtacggttcctctgtacctgagcaacagatcacagcttatctctctcgaatccagcgaggtggttacattcagcctttcggatgtatgatcgccgtcgatgaatccagtttccggatcatcggttacagtgaaaacgccagagaaatgttagggattatgcctcaatctgttcctactcttgagaaacctgagattctagctatgggaactgatgtgagatctttgttcacttcttcgagctcgattctactcgagcgtgctttcgttgctcgagagattaccttgttaaatccggtttggatccattccaagaatactggtaaaccgttttacgccattcttcataggattgatgttggtgttgttattgatttagagccagctagaactgaagatcctgcgctttctattgctggtgctgttcaatcgcagaaactcgcggttcgtgcgatttctcagttacaggctcttcctggtggagatattaagcttttgtgtgacactgtcgtggaaagtgtgagggacttgactggttatgatcgtgttatggtttataagtttcatgaagatgagcatggagaagttgtagctgagagtaaacgagatgatttagagccttatattggactgcatgttcctgctactgatattcctcaagcgtcaaggttcttgtttaagcagaaccgtgtccgaatgatagtagattgcaatgccacacctgttcttgtggtccaggacgataggctaactcagtctatgtgcttggttggttctactcttagggctcctcatggttgtcactctcagtatatggctaacatgggatctattgcgtctttagcaatggcggttataatcaatggaaatgaagatgatgggagcaatgtagctagtggaagaagctcgatgaggctttggggtttggttgtttgccatcacacttcttctcgctgcataccgtttccgctaaggtatgcttgtgagtttttgatgcaggctttcggtttacagttaaacatggaattgcagttagctttgcaaatgtcagagaaacgcgttttgagaacgcagacactgttatgtgatatgcttctgcgtgactcgcctgctggaattgttacacagagtcccagtatcatggacttagtgaaatgtgacggtgcagcatttctttaccacgggaagtattacccgttgggtgttgctcctagtgaagttcagataaaagatgttgtggagtggttgcttgcgaatcatgcggattcaaccggattaagcactgatagtttaggcgatgcggggtatcccggtgcagctgcgttaggggatgctgtgtgcggtatggcagttgcatatatcacaaaaagagactttcttttttggtttcgatctcacactgcgaaagaaatcaaatggggaggcgctaagcatcatccggaggataaagatgatgggcaacgaatgcatcctcgttcgtcctttcaggcttttcttgaagttgttaagagccggagtcagccatgggaaactgcggaaatggatgcgattcactcgctccagcttattctgagagactcttttaaagaatctgaggcggctatgaactctaaagttgtggatggtgtggttcagccatgtagggatatggcgggggaacaggggattgatgagttaggtgcagttgcaagagagatggttaggctcattgagactgcaactgttcctatattcgctgtggatgccggaggctgcatcaatggatggaacgctaagattgcagagttgacaggtctctcagttgaagaagctatggggaagtctctggtttctgatttaatatacaaagagaatgaagcaactgtcaataagcttctttctcgtgctttgagaggggacgaggaaaagaatgtggaggttaagctgaaaactttcagccccgaactacaagggaaagcagtttttgtggttgtgaatgcttgttccagcaaggactacttgaacaacattgtcggcgtttgttttgttggacaagacgttactagtcagaaaatcgtaatggataagttcatcaacatacaaggagattacaaggctattgtacatagcccaaaccctctaatcccgccaatttttgctgctgacgagaacacgtgctgcctggaatggaacatggcgatggaaaagcttacgggttggtctcgcagtgaagtgattgggaaaatgattgtcggggaagtgtttgggagctgttgcatgctaaagggtcctgatgctttaaccaagttcatgattgtattgcataatgcgattggtggccaagatacggataagttccctttcccattctttgaccgcaatgggaagtttgttcaggctctattgactgcaaacaagcgggttagcctcgagggaaaggttattggggctttctgtttcttgcaaatcccgagccctgagctgcagcaagctttagcagtccaacggaggcaggacacagagtgtttcacgaaggcaaaagagttggcttatatttgtcaggtgataaagaatcctttgagcggtatgcgtttcgcaaactcattgttggaggccacagacttgaacgaggaccagaagcagttacttgaaacaagtgtttcttgcgagaaacagatctcaaggatcgtcggggacatggatcttgaaagcattgaagacggttcatttgtgctaaagagggaagagtttttccttggaagtgtcataaacgcgattgtaagtcaagcgatgttcttattaagggacagaggtcttcagctgatccgtgacattcccgaagagatcaaatcaatagaggtttttggagaccagataaggattcaacagctcctggctgagtttctgctgagtataatccggtatgcaccatctcaagagtgggtggagatccatttaagccaactttcaaagcaaatggctgatggattcgccgccatccgcacagaattcagaatggcgtgtccaggtgaaggtctgcctccagagctagtccgagacatgttccatagcagcaggtggacaagccctgaaggtttaggtctaagcgtatgtcgaaagattttaaagctaatgaacggtgaggttcaatacatccgagaatcagaacggtcctatttcctcatcattctggaactccctgtacctcgaaagcgaccattgtcaactgctagtggaagtggtgacatgatgctgatgatgccatattagatggtttccggagtcgggggtagtggcggtggccgtggcggtggccgtggcggagaagaagaaccgtcgtcaagtcacactcctaataaccgaagaggaggagaacaagctcaatcgtcgggaacgaaatctctcagaccaagaagcaacactgaatcaatgagcaaagcaattcaacagtacaccgtcgacgcaagactccacgccgttttcgaacaatccggcgaatcagggaaatcattcgactactcacaatcactcaaaacgacgacgtacggttcctctgtacctgagcaacagatcacagcttatctctctcgaatccagcgaggtggttacattcagcctttcggatgtatgatcgccgtcgatgaatccagtttccggatcatcggttacagtgaaaacgccagagaaatgttagggattatgcctcaatctgttcctactcttgagaaacctgagattctagctatgggaactgatgtgagatctttgttcacttcttcgagctcgattctactcgagcgtgctttcgttgctcgagagattaccttgttaaatccggtttggatccattccaagaatactggtaaaccgttttacgccattcttcataggattgatgttggtgttgttattgatttagagccagctagaactgaagatcctgcgctttctattgctggtgctgttcaatcgcagaaactcgcggttcgtgcgatttctcagttacaggctcttcctggtggagatattaagcttttgtgtgacactgtcgtggaaagtgtgagggacttgactggttatgatcgtgttatggtttataagtttcatgaagatgagcatggagaagttgtagctgagagtaaacgagatgatttagagccttatattggactgcatgttcctgctactgatattcctcaagcgtcaaggttcttgtttaagcagaaccgtgtccgaatgatagtagattgcaatgccacacctgttcttgtggtccaggacgataggctaactcagtctatgtgcttggttggttctactcttagggctcctcatggttgtcactctcagtatatggctaacatgggatctattgcgtctttagcaatggcggttataatcaatggaaatgaagatgatgggagcaatgtagctagtggaagaagctcgatgaggctttggggtttggttgtttgccatcacacttcttctcgctgcataccgtttccgctaaggtatgcttgtgagtttttgatgcaggctttcggtttacagttaaacatggaattgcagttagctttgcaaatgtcagagaaacgcgttttgagaacgcagacactgttatgtgatatgcttctgcgtgactcgcctgctggaattgttacacagagtcccagtatcatggacttagtgaaatgtgacggtgcagcatttctttaccacgggaagtattacccgttgggtgttgctcctagtgaagttcagataaaagatgttgtggagtggttgcttgcgaatcatgcggattcaaccggattaagcactgatagtttaggcgatgcggggtatcccggtgcagctgcgttaggggatgctgtgtgcggtatggcagttgcatatatcacaaaaagagactttcttttttggtttcgatctcacactgcgaaagaaatcaaatggggaggcgctaagcatcatccggaggataaagatgatgggcaacgaatgcatcctcgttcgtcctttcaggcttttcttgaagttgttaagagccggagtcagccatgggaaactgcggaaatggatgcgattcactcgctccagcttattctgagagactcttttaaagaatctgaggcggctatgaactctaaagttgtggatggtgtggttcagccatgtagggatatggcgggggaacaggggattgatgagttaggtgcagttgcaagagagatggttaggctcattgagactgcaactgttcctatattcgctgtggatgccggaggctgcatcaatggatggaacgctaagattgcagagttgacaggtctctcagttgaagaagctatggggaagtctctggtttctgatttaatatacaaagagaatgaagcaactgtcaataagcttctttctcgtgctttgagaggggacgaggaaaagaatgtggaggttaagctgaaaactttcagccccgaactacaagggaaagcagtttttgtggttgtgaatgcttgttccagcaaggactacttgaacaacattgtcggcgtttgttttgttggacaagacgttactagtcagaaaatcgtaatggataagttcatcaacatacaaggagattacaaggctattgtacatagcccaaaccctctaatcccgccaatttttgctgctgacgagaacacgtgctgcctggaatggaacatggcgatggaaaagcttacgggttggtctcgcagtgaagtgattgggaaaatgattgtcggggaagtgtttgggagctgttgcatgctaaagggtcctgatgctttaaccaagttcatgattgtattgcataatgcgattggtggccaagatacggataagttccctttcccattctttgaccgcaatgggaagtttgttcaggctctattgactgcaaacaagcgggttagcctcgagggaaaggttattggggctttctgtttcttgcaaatcccgagccctgagctgcagcaagctttagcagtccaacggaggcaggacacagagtgtttcacgaaggcaaaagagttggcttatatttgtcaggtgataaagaatcctttgagcggtatgcgtttcgcaaactcattgttggaggccacagacttgaacgaggaccagaagcagttacttgaaacaagtgtttcttgcgagaaacagatctcaaggatcgtcggggacatggatcttgaaagcattgaagacggttcatttgtgctaaagagggaagagtttttccttggaagtgtcataaacgcgattgtaagtcaagcgatgttcttattaagggacagaggtcttcagctgatccgtgacattcccgaagagatcaaatcaatagaggtttttggagaccagataaggattcaacagctcctggctgagtttctgctgagtataatccggtatgcaccatctcaagagtgggtggagatccatttaagccaactttcaaagcaaatggctgatggattcgccgccatccgcacagaattcagaatggcgtgtccaggtgaaggtctgcctccagagctagtccgagacatgttccatagcagcaggtggacaagccctgaaggtttaggtctaagcgtatgtcgaaagattttaaagctaatgaacggtgaggttcaatacatccgagaatcagaacggtcctatttcctcatcattctggaactccctgtacctcgaaagcgaccattgtcaactgctagtggaagtggtgacatgatgctgatgatgccatattagatggtttccggagtcgggggtagtggcggtggccgtggcggtggccgtggcggagaagaagaaccgtcgtcaagtcacactcctaataaccgaagaggaggagaacaagctcaatcgtcgggaacgaaatctctcagaccaagaagcaacactgaatcaatgagcaaagcaattcaacagtacaccgtcgacgcaagactccacgccgttttcgaacaatccggcgaatcagggaaatcattcgactactcacaatcactcaaaacgacgacgtacggttcctctgtacctgagcaacagatcacagcttatctctctcgaatccagcgaggtggttacattcagcctttcggatgtatgatcgccgtcgatgaatccagtttccggatcatcggttacagtgaaaacgccagagaaatgttagggattatgcctcaatctgttcctactcttgagaaacctgagattctagctatgggaactgatgtgagatctttgttcacttcttcgagctcgattctactcgagcgtgctttcgttgctcgagagattaccttgttaaatccggtttggatccattccaagaatactggtaaaccgttttacgccattcttcataggattgatgttggtgttgttattgatttagagccagctagaactgaagatcctgcgctttctattgctggtgctgttcaatcgcagaaactcgcggttcgtgcgatttctcagttacaggctcttcctggtggagatattaagcttttgtgtgacactgtcgtggaaagtgtgagggacttgactggttatgatcgtgttatggtttataagtttcatgaagatgagcatggagaagttgtagctgagagtaaacgagatgatttagagccttatattggactgcatgttcctgctactgatattcctcaagcgtcaaggttcttgtttaagcagaaccgtgtccgaatgatagtagattgcaatgccacacctgttcttgtggtccaggacgataggctaactcagtctatgtgcttggttggttctactcttagggctcctcatggttgtcactctcagtatatggctaacatgggatctattgcgtctttagcaatggcggttataatcaatggaaatgaagatgatgggagcaatgtagctagtggaagaagctcgatgaggctttggggtttggttgtttgccatcacacttcttctcgctgcataccgtttccgctaaggtatgcttgtgagtttttgatgcaggctttcggtttacagttaaacatggaattgcagttagctttgcaaatgtcagagaaacgcgttttgagaacgcagacactgttatgtgatatgcttctgcgtgactcgcctgctggaattgttacacagagtcccagtatcatggacttagtgaaatgtgacggtgcagcatttctttaccacgggaagtattacccgttgggtgttgctcctagtgaagttcagataaaagatgttgtggagtggttgcttgcgaatcatgcggattcaaccggattaagcactgatagtttaggcgatgcggggtatcccggtgcagctgcgttaggggatgctgtgtgcggtatggcagttgcatatatcacaaaaagagactttcttttttggtttcgatctcacactgcgaaagaaatcaaatggggaggcgctaagcatcatccggaggataaagatgatgggcaacgaatgcatcctcgttcgtcctttcaggcttttcttgaagttgttaagagccggagtcagccatgggaaactgcggaaatggatgcgattcactcgctccagcttattctgagagactcttttaaagaatctgaggcggctatgaactctaaagttgtggatggtgtggttcagccatgtagggatatggcgggggaacaggggattgatgagttaggtgcagttgcaagagagatggttaggctcattgagactgcaactgttcctatattcgctgtggatgccggaggctgcatcaatggatggaacgctaagattgcagagttgacaggtctctcagttgaagaagctatggggaagtctctggtttctgatttaatatacaaagagaatgaagcaactgtcaataagcttctttctcgtgctttgagaggggacgaggaaaagaatgtggaggttaagctgaaaactttcagccccgaactacaagggaaagcagtttttgtggttgtgaatgcttgttccagcaaggactacttgaacaacattgtcggcgtttgttttgttggacaagacgttactagtcagaaaatcgtaatggataagttcatcaacatacaaggagattacaaggctattgtacatagcccaaaccctctaatcccgccaatttttgctgctgacgagaacacgtgctgcctggaatggaacatggcgatggaaaagcttacgggttggtctcgcagtgaagtgattgggaaaatgattgtcggggaagtgtttgggagctgttgcatgctaaagggtcctgatgctttaaccaagttcatgattgtattgcataatgcgattggtggccaagatacggataagttccctttcccattctttgaccgcaatgggaagtttgttcaggctctattgactgcaaacaagcgggttagcctcgagggaaaggttattggggctttctgtttcttgcaaatcccgagccctgagctgcagcaagctttagcagtccaacggaggcaggacacagagtgtttcacgaaggcaaaagagttggcttatatttgtcaggtgataaagaatcctttgagcggtatgcgtttcgcaaactcattgttggaggccacagacttgaacgaggaccagaagcagttacttgaaacaagtgtttcttgcgagaaacagatctcaaggatcgtcggggacatggatcttgaaagcattgaagacggttcatttgtgctaaagagggaagagtttttccttggaagtgtcataaacgcgattgtaagtcaagcgatgttcttattaagggacagaggtcttcagctgatccgtgacattcccgaagagatcaaatcaatagaggtttttggagaccagataaggattcaacagctcctggctgagtttctgctgagtataatccggtatgcaccatctcaagagtgggtggagatccatttaagccaactttcaaagcaaatggctgatggattcgccgccatccgcacagaattcagaatggcgtgtccaggtgaaggtctgcctccagagctagtccgagacatgttccatagcagcaggtggacaagccctgaaggtttaggtctaagcgtatgtcgaaagattttaaagctaatgaacggtgaggttcaatacatccgagaatcagaacggtcctatttcctcatcattctggaactccctgtacctcgaaagcgaccattgtcaactgctagtggaagtggtgacatgatgctgatgatgccatattagatggtttccggagtcgggggtagtggcggtggccgtggcggtggccgtggcggagaagaagaaccgtcgtcaagtcacactcctaataaccgaagaggaggagaacaagctcaatcgtcgggaacgaaatctctcagaccaagaagcaacactgaatcaatgagcaaagcaattcaacagtacaccgtcgacgcaagactccacgccgttttcgaacaatccggcgaatcagggaaatcattcgactactcacaatcactcaaaacgacgacgtacggttcctctgtacctgagcaacagatcacagcttatctctctcgaatccagcgaggtggttacattcagcctttcggatgtatgatcgccgtcgatgaatccagtttccggatcatcggttacagtgaaaacgccagagaaatgttagggattatgcctcaatctgttcctactcttgagaaacctgagattctagctatgggaactgatgtgagatctttgttcacttcttcgagctcgattctactcgagcgtgctttcgttgctcgagagattaccttgttaaatccggtttggatccattccaagaatactggtaaaccgttttacgccattcttcataggattgatgttggtgttgttattgatttagagccagctagaactgaagatcctgcgctttctattgctggtgctgttcaatcgcagaaactcgcggttcgtgcgatttctcagttacaggctcttcctggtggagatattaagcttttgtgtgacactgtcgtggaaagtgtgagggacttgactggttatgatcgtgttatggtttataagtttcatgaagatgagcatggagaagttgtagctgagagtaaacgagatgatttagagccttatattggactgcatgttcctgctactgatattcctcaagcgtcaaggttcttgtttaagcagaaccgtgtccgaatgatagtagattgcaatgccacacctgttcttgtggtccaggacgataggctaactcagtctatgtgcttggttggttctactcttagggctcctcatggttgtcactctcagtatatggctaacatgggatctattgcgtctttagcaatggcggttataatcaatggaaatgaagatgatgggagcaatgtagctagtggaagaagctcgatgaggctttggggtttggttgtttgccatcacacttcttctcgctgcataccgtttccgctaaggtatgcttgtgagtttttgatgcaggctttcggtttacagttaaacatggaattgcagttagctttgcaaatgtcagagaaacgcgttttgagaacgcagacactgttatgtgatatgcttctgcgtgactcgcctgctggaattgttacacagagtcccagtatcatggacttagtgaaatgtgacggtgcagcatttctttaccacgggaagtattacccgttgggtgttgctcctagtgaagttcagataaaagatgttgtggagtggttgcttgcgaatcatgcggattcaaccggattaagcactgatagtttaggcgatgcggggtatcccggtgcagctgcgttaggggatgctgtgtgcggtatggcagttgcatatatcacaaaaagagactttcttttttggtttcgatctcacactgcgaaagaaatcaaatggggaggcgctaagcatcatccggaggataaagatgatgggcaacgaatgcatcctcgttcgtcctttcaggcttttcttgaagttgttaagagccggagtcagccatgggaaactgcggaaatggatgcgattcactcgctccagcttattctgagagactcttttaaagaatctgaggcggctatgaactctaaagttgtggatggtgtggttcagccatgtagggatatggcgggggaacaggggattgatgagttaggtgcagttgcaagagagatggttaggctcattgagactgcaactgttcctatattcgctgtggatgccggaggctgcatcaatggatggaacgctaagattgcagagttgacaggtctctcagttgaagaagctatggggaagtctctggtttctgatttaatatacaaagagaatgaagcaactgtcaataagcttctttctcgtgctttgagaggggacgaggaaaagaatgtggaggttaagctgaaaactttcagccccgaactacaagggaaagcagtttttgtggttgtgaatgcttgttccagcaaggactacttgaacaacattgtcggcgtttgttttgttggacaagacgttactagtcagaaaatcgtaatggataagttcatcaacatacaaggagattacaaggctattgtacatagcccaaaccctctaatcccgccaatttttgctgctgacgagaacacgtgctgcctggaatggaacatggcgatggaaaagcttacgggttggtctcgcagtgaagtgattgggaaaatgattgtcggggaagtgtttgggagctgttgcatgctaaagggtcctgatgctttaaccaagttcatgattgtattgcataatgcgattggtggccaagatacggataagttccctttcccattctttgaccgcaatgggaagtttgttcaggctctattgactgcaaacaagcgggttagcctcgagggaaaggttattggggctttctgtttcttgcaaatcccgagccctgagctgcagcaagctttagcagtccaacggaggcaggacacagagtgtttcacgaaggcaaaagagttggcttatatttgtcaggtgataaagaatcctttgagcggtatgcgtttcgcaaactcattgttggaggccacagacttgaacgaggaccagaagcagttacttgaaacaagtgtttcttgcgagaaacagatctcaaggatcgtcggggacatggatcttgaaagcattgaagacggttcatttgtgctaaagagggaagagtttttccttggaagtgtcataaacgcgattgtaagtcaagcgatgttcttattaagggacagaggtcttcagctgatccgtgacattcccgaagagatcaaatcaatagaggtttttggagaccagataaggattcaacagctcctggctgagtttctgctgagtataatccggtatgcaccatctcaagagtgggtggagatccatttaagccaactttcaaagcaaatggctgatggattcgccgccatccgcacagaattcagaatggcgtgtccaggtgaaggtctgcctccagagctagtccgagacatgttccatagcagcaggtggacaagccctgaaggtttaggtctaagcgtatgtcgaaagattttaaagctaatgaacggtgaggttcaatacatccgagaatcagaacggtcctatttcctcatcattctggaactccctgtacctcgaaagcgaccattgtcaactgctagtggaagtggtgacatgatgctgatgatgccatattagatggtttccggagtcgggggtagtggcggtggccgtggcggtggccgtggcggagaagaagaaccgtcgtcaagtcacactcctaataaccgaagaggaggagaacaagctcaatcgtcgggaacgaaatctctcagaccaagaagcaacactgaatcaatgagcaaagcaattcaacagtacaccgtcgacgcaagactccacgccgttttcgaacaatccggcgaatcagggaaatcattcgactactcacaatcactcaaaacgacgacgtacggttcctctgtacctgagcaacagatcacagcttatctctctcgaatccagcgaggtggttacattcagcctttcggatgtatgatcgccgtcgatgaatccagtttccggatcatcggttacagtgaaaacgccagagaaatgttagggattatgcctcaatctgttcctactcttgagaaacctgagattctagctatgggaactgatgtgagatctttgttcacttcttcgagctcgattctactcgagcgtgctttcgttgctcgagagattaccttgttaaatccggtttggatccattccaagaatactggtaaaccgttttacgccattcttcataggattgatgttggtgttgttattgatttagagccagctagaactgaagatcctgcgctttctattgctggtgctgttcaatcgcagaaactcgcggttcgtgcgatttctcagttacaggctcttcctggtggagatattaagcttttgtgtgacactgtcgtggaaagtgtgagggacttgactggttatgatcgtgttatggtttataagtttcatgaagatgagcatggagaagttgtagctgagagtaaacgagatgatttagagccttatattggactgcatgttcctgctactgatattcctcaagcgtcaaggttcttgtttaagcagaaccgtgtccgaatgatagtagattgcaatgccacacctgttcttgtggtccaggacgataggctaactcagtctatgtgcttggttggttctactcttagggctcctcatggttgtcactctcagtatatggctaacatgggatctattgcgtctttagcaatggcggttataatcaatggaaatgaagatgatgggagcaatgtagctagtggaagaagctcgatgaggctttggggtttggttgtttgccatcacacttcttctcgctgcataccgtttccgctaaggtatgcttgtgagtttttgatgcaggctttcggtttacagttaaacatggaattgcagttagctttgcaaatgtcagagaaacgcgttttgagaacgcagacactgttatgtgatatgcttctgcgtgactcgcctgctggaattgttacacagagtcccagtatcatggacttagtgaaatgtgacggtgcagcatttctttaccacgggaagtattacccgttgggtgttgctcctagtgaagttcagataaaagatgttgtggagtggttgcttgcgaatcatgcggattcaaccggattaagcactgatagtttaggcgatgcggggtatcccggtgcagctgcgttaggggatgctgtgtgcggtatggcagttgcatatatcacaaaaagagactttcttttttggtttcgatctcacactgcgaaagaaatcaaatggggaggcgctaagcatcatccggaggataaagatgatgggcaacgaatgcatcctcgttcgtcctttcaggcttttcttgaagttgttaagagccggagtcagccatgggaaactgcggaaatggatgcgattcactcgctccagcttattctgagagactcttttaaagaatctgaggcggctatgaactctaaagttgtggatggtgtggttcagccatgtagggatatggcgggggaacaggggattgatgagttaggtgcagttgcaagagagatggttaggctcattgagactgcaactgttcctatattcgctgtggatgccggaggctgcatcaatggatggaacgctaagattgcagagttgacaggtctctcagttgaagaagctatggggaagtctctggtttctgatttaatatacaaagagaatgaagcaactgtcaataagcttctttctcgtgctttgagaggggacgaggaaaagaatgtggaggttaagctgaaaactttcagccccgaactacaagggaaagcagtttttgtggttgtgaatgcttgttccagcaaggactacttgaacaacattgtcggcgtttgttttgttggacaagacgttactagtcagaaaatcgtaatggataagttcatcaacatacaaggagattacaaggctattgtacatagcccaaaccctctaatcccgccaatttttgctgctgacgagaacacgtgctgcctggaatggaacatggcgatggaaaagcttacgggttggtctcgcagtgaagtgattgggaaaatgattgtcggggaagtgtttgggagctgttgcatgctaaagggtcctgatgctttaaccaagttcatgattgtattgcataatgcgattggtggccaagatacggataagttccctttcccattctttgaccgcaatgggaagtttgttcaggctctattgactgcaaacaagcgggttagcctcgagggaaaggttattggggctttctgtttcttgcaaatcccgagccctgagctgcagcaagctttagcagtccaacggaggcaggacacagagtgtttcacgaaggcaaaagagttggcttatatttgtcaggtgataaagaatcctttgagcggtatgcgtttcgcaaactcattgttggaggccacagacttgaacgaggaccagaagcagttacttgaaacaagtgtttcttgcgagaaacagatctcaaggatcgtcggggacatggatcttgaaagcattgaagacggttcatttgtgctaaagagggaagagtttttccttggaagtgtcataaacgcgattgtaagtcaagcgatgttcttattaagggacagaggtcttcagctgatccgtgacattcccgaagagatcaaatcaatagaggtttttggagaccagataaggattcaacagctcctggctgagtttctgctgagtataatccggtatgcaccatctcaagagtgggtggagatccatttaagccaactttcaaagcaaatggctgatggattcgccgccatccgcacagaattcagaatggcgtgtccaggtgaaggtctgcctccagagctagtccgagacatgttccatagcagcaggtggacaagccctgaaggtttaggtctaagcgtatgtcgaaagattttaaagctaatgaacggtgaggttcaatacatccgagaatcagaacggtcctatttcctcatcattctggaactccctgtacctcgaaagcgaccattgtcaactgctagtggaagtggtgacatgatgctgatgatgccatattagatggtttccggagtcgggggtagtggcggtggccgtggcggtggccgtggcggagaagaagaaccgtcgtcaagtcacactcctaataaccgaagaggaggagaacaagctcaatcgtcgggaacgaaatctctcagaccaagaagcaacactgaatcaatgagcaaagcaattcaacagtacaccgtcgacgcaagactccacgccgttttcgaacaatccggcgaatcagggaaatcattcgactactcacaatcactcaaaacgacgacgtacggttcctctgtacctgagcaacagatcacagcttatctctctcgaatccagcgaggtggttacattcagcctttcggatgtatgatcgccgtcgatgaatccagtttccggatcatcggttacagtgaaaacgccagagaaatgttagggattatgcctcaatctgttcctactcttgagaaacctgagattctagctatgggaactgatgtgagatctttgttcacttcttcgagctcgattctactcgagcgtgctttcgttgctcgagagattaccttgttaaatccggtttggatccattccaagaatactggtaaaccgttttacgccattcttcataggattgatgttggtgttgttattgatttagagccagctagaactgaagatcctgcgctttctattgctggtgctgttcaatcgcagaaactcgcggttcgtgcgatttctcagttacaggctcttcctggtggagatattaagcttttgtgtgacactgtcgtggaaagtgtgagggacttgactggttatgatcgtgttatggtttataagtttcatgaagatgagcatggagaagttgtagctgagagtaaacgagatgatttagagccttatattggactgcatgttcctgctactgatattcctcaagcgtcaaggttcttgtttaagcagaaccgtgtccgaatgatagtagattgcaatgccacacctgttcttgtggtccaggacgataggctaactcagtctatgtgcttggttggttctactcttagggctcctcatggttgtcactctcagtatatggctaacatgggatctattgcgtctttagcaatggcggttataatcaatggaaatgaagatgatgggagcaatgtagctagtggaagaagctcgatgaggctttggggtttggttgtttgccatcacacttcttctcgctgcataccgtttccgctaaggtatgcttgtgagtttttgatgcaggctttcggtttacagttaaacatggaattgcagttagctttgcaaatgtcagagaaacgcgttttgagaacgcagacactgttatgtgatatgcttctgcgtgactcgcctgctggaattgttacacagagtcccagtatcatggacttagtgaaatgtgacggtgcagcatttctttaccacgggaagtattacccgttgggtgttgctcctagtgaagttcagataaaagatgttgtggagtggttgcttgcgaatcatgcggattcaaccggattaagcactgatagtttaggcgatgcggggtatcccggtgcagctgcgttaggggatgctgtgtgcggtatggcagttgcatatatcacaaaaagagactttcttttttggtttcgatctcacactgcgaaagaaatcaaatggggaggcgctaagcatcatccggaggataaagatgatgggcaacgaatgcatcctcgttcgtcctttcaggcttttcttgaagttgttaagagccggagtcagccatgggaaactgcggaaatggatgcgattcactcgctccagcttattctgagagactcttttaaagaatctgaggcggctatgaactctaaagttgtggatggtgtggttcagccatgtagggatatggcgggggaacaggggattgatgagttaggtgcagttgcaagagagatggttaggctcattgagactgcaactgttcctatattcgctgtggatgccggaggctgcatcaatggatggaacgctaagattgcagagttgacaggtctctcagttgaagaagctatggggaagtctctggtttctgatttaatatacaaagagaatgaagcaactgtcaataagcttctttctcgtgctttgagaggggacgaggaaaagaatgtggaggttaagctgaaaactttcagccccgaactacaagggaaagcagtttttgtggttgtgaatgcttgttccagcaaggactacttgaacaacattgtcggcgtttgttttgttggacaagacgttactagtcagaaaatcgtaatggataagttcatcaacatacaaggagattacaaggctattgtacatagcccaaaccctctaatcccgccaatttttgctgctgacgagaacacgtgctgcctggaatggaacatggcgatggaaaagcttacgggttggtctcgcagtgaagtgattgggaaaatgattgtcggggaagtgtttgggagctgttgcatgctaaagggtcctgatgctttaaccaagttcatgattgtattgcataatgcgattggtggccaagatacggataagttccctttcccattctttgaccgcaatgggaagtttgttcaggctctattgactgcaaacaagcgggttagcctcgagggaaaggttattggggctttctgtttcttgcaaatcccgagccctgagctgcagcaagctttagcagtccaacggaggcaggacacagagtgtttcacgaaggcaaaagagttggcttatatttgtcaggtgataaagaatcctttgagcggtatgcgtttcgcaaactcattgttggaggccacagacttgaacgaggaccagaagcagttacttgaaacaagtgtttcttgcgagaaacagatctcaaggatcgtcggggacatggatcttgaaagcattgaagacggttcatttgtgctaaagagggaagagtttttccttggaagtgtcataaacgcgattgtaagtcaagcgatgttcttattaagggacagaggtcttcagctgatccgtgacattcccgaagagatcaaatcaatagaggtttttggagaccagataaggattcaacagctcctggctgagtttctgctgagtataatccggtatgcaccatctcaagagtgggtggagatccatttaagccaactttcaaagcaaatggctgatggattcgccgccatccgcacagaattcagaatggcgtgtccaggtgaaggtctgcctccagagctagtccgagacatgttccatagcagcaggtggacaagccctgaaggtttaggtctaagcgtatgtcgaaagattttaaagctaatgaacggtgaggttcaatacatccgagaatcagaacggtcctatttcctcatcattctggaactccctgtacctcgaaagcgaccattgtcaactgctagtggaagtggtgacatgatgctgatgatgccatattagatggtttccggagtcgggggtagtggcggtggccgtggcggtggccgtggcggagaagaagaaccgtcgtcaagtcacactcctaataaccgaagaggaggagaacaagctcaatcgtcgggaacgaaatctctcagaccaagaagcaacactgaatcaatgagcaaagcaattcaacagtacaccgtcgacgcaagactccacgccgttttcgaacaatccggcgaatcagggaaatcattcgactactcacaatcactcaaaacgacgacgtacggttcctctgtacctgagcaacagatcacagcttatctctctcgaatccagcgaggtggttacattcagcctttcggatgtatgatcgccgtcgatgaatccagtttccggatcatcggttacagtgaaaacgccagagaaatgttagggattatgcctcaatctgttcctactcttgagaaacctgagattctagctatgggaactgatgtgagatctttgttcacttcttcgagctcgattctactcgagcgtgctttcgttgctcgagagattaccttgttaaatccggtttggatccattccaagaatactggtaaaccgttttacgccattcttcataggattgatgttggtgttgttattgatttagagccagctagaactgaagatcctgcgctttctattgctggtgctgttcaatcgcagaaactcgcggttcgtgcgatttctcagttacaggctcttcctggtggagatattaagcttttgtgtgacactgtcgtggaaagtgtgagggacttgactggttatgatcgtgttatggtttataagtttcatgaagatgagcatggagaagttgtagctgagagtaaacgagatgatttagagccttatattggactgcatgttcctgctactgatattcctcaagcgtcaaggttcttgtttaagcagaaccgtgtccgaatgatagtagattgcaatgccacacctgttcttgtggtccaggacgataggctaactcagtctatgtgcttggttggttctactcttagggctcctcatggttgtcactctcagtatatggctaacatgggatctattgcgtctttagcaatggcggttataatcaatggaaatgaagatgatgggagcaatgtagctagtggaagaagctcgatgaggctttggggtttggttgtttgccatcacacttcttctcgctgcataccgtttccgctaaggtatgcttgtgagtttttgatgcaggctttcggtttacagttaaacatggaattgcagttagctttgcaaatgtcagagaaacgcgttttgagaacgcagacactgttatgtgatatgcttctgcgtgactcgcctgctggaattgttacacagagtcccagtatcatggacttagtgaaatgtgacggtgcagcatttctttaccacgggaagtattacccgttgggtgttgctcctagtgaagttcagataaaagatgttgtggagtggttgcttgcgaatcatgcggattcaaccggattaagcactgatagtttaggcgatgcggggtatcccggtgcagctgcgttaggggatgctgtgtgcggtatggcagttgcatatatcacaaaaagagactttcttttttggtttcgatctcacactgcgaaagaaatcaaatggggaggcgctaagcatcatccggaggataaagatgatgggcaacgaatgcatcctcgttcgtcctttcaggcttttcttgaagttgttaagagccggagtcagccatgggaaactgcggaaatggatgcgattcactcgctccagcttattctgagagactcttttaaagaatctgaggcggctatgaactctaaagttgtggatggtgtggttcagccatgtagggatatggcgggggaacaggggattgatgagttaggtgcagttgcaagagagatggttaggctcattgagactgcaactgttcctatattcgctgtggatgccggaggctgcatcaatggatggaacgctaagattgcagagttgacaggtctctcagttgaagaagctatggggaagtctctggtttctgatttaatatacaaagagaatgaagcaactgtcaataagcttctttctcgtgctttgagaggggacgaggaaaagaatgtggaggttaagctgaaaactttcagccccgaactacaagggaaagcagtttttgtggttgtgaatgcttgttccagcaaggactacttgaacaacattgtcggcgtttgttttgttggacaagacgttactagtcagaaaatcgtaatggataagttcatcaacatacaaggagattacaaggctattgtacatagcccaaaccctctaatcccgccaatttttgctgctgacgagaacacgtgctgcctggaatggaacatggcgatggaaaagcttacgggttggtctcgcagtgaagtgattgggaaaatgattgtcggggaagtgtttgggagctgttgcatgctaaagggtcctgatgctttaaccaagttcatgattgtattgcataatgcgattggtggccaagatacggataagttccctttcccattctttgaccgcaatgggaagtttgttcaggctctattgactgcaaacaagcgggttagcctcgagggaaaggttattggggctttctgtttcttgcaaatcccgagccctgagctgcagcaagctttagcagtccaacggaggcaggacacagagtgtttcacgaaggcaaaagagttggcttatatttgtcaggtgataaagaatcctttgagcggtatgcgtttcgcaaactcattgttggaggccacagacttgaacgaggaccagaagcagttacttgaaacaagtgtttcttgcgagaaacagatctcaaggatcgtcggggacatggatcttgaaagcattgaagacggttcatttgtgctaaagagggaagagtttttccttggaagtgtcataaacgcgattgtaagtcaagcgatgttcttattaagggacagaggtcttcagctgatccgtgacattcccgaagagatcaaatcaatagaggtttttggagaccagataaggattcaacagctcctggctgagtttctgctgagtataatccggtatgcaccatctcaagagtgggtggagatccatttaagccaactttcaaagcaaatggctgatggattcgccgccatccgcacagaattcagaatggcgtgtccaggtgaaggtctgcctccagagctagtccgagacatgttccatagcagcaggtggacaagccctgaaggtttaggtctaagcgtatgtcgaaagattttaaagctaatgaacggtgaggttcaatacatccgagaatcagaacggtcctatttcctcatcattctggaactccctgtacctcgaaagcgaccattgtcaactgctagtggaagtggtgacatgatgctgatgatgccatattagatggtttccggagtcgggggtagtggcggtggccgtggcggtggccgtggcggagaagaagaaccgtcgtcaagtcacactcctaataaccgaagaggaggagaacaagctcaatcgtcgggaacgaaatctctcagaccaagaagcaacactgaatcaatgagcaaagcaattcaacagtacaccgtcgacgcaagactccacgccgttttcgaacaatccggcgaatcagggaaatcattcgactactcacaatcactcaaaacgacgacgtacggttcctctgtacctgagcaacagatcacagcttatctctctcgaatccagcgaggtggttacattcagcctttcggatgtatgatcgccgtcgatgaatccagtttccggatcatcggttacagtgaaaacgccagagaaatgttagggattatgcctcaatctgttcctactcttgagaaacctgagattctagctatgggaactgatgtgagatctttgttcacttcttcgagctcgattctactcgagcgtgctttcgttgctcgagagattaccttgttaaatccggtttggatccattccaagaatactggtaaaccgttttacgccattcttcataggattgatgttggtgttgttattgatttagagccagctagaactgaagatcctgcgctttctattgctggtgctgttcaatcgcagaaactcgcggttcgtgcgatttctcagttacaggctcttcctggtggagatattaagcttttgtgtgacactgtcgtggaaagtgtgagggacttgactggttatgatcgtgttatggtttataagtttcatgaagatgagcatggagaagttgtagctgagagtaaacgagatgatttagagccttatattggactgcatgttcctgctactgatattcctcaagcgtcaaggttcttgtttaagcagaaccgtgtccgaatgatagtagattgcaatgccacacctgttcttgtggtccaggacgataggctaactcagtctatgtgcttggttggttctactcttagggctcctcatggttgtcactctcagtatatggctaacatgggatctattgcgtctttagcaatggcggttataatcaatggaaatgaagatgatgggagcaatgtagctagtggaagaagctcgatgaggctttggggtttggttgtttgccatcacacttcttctcgctgcataccgtttccgctaaggtatgcttgtgagtttttgatgcaggctttcggtttacagttaaacatggaattgcagttagctttgcaaatgtcagagaaacgcgttttgagaacgcagacactgttatgtgatatgcttctgcgtgactcgcctgctggaattgttacacagagtcccagtatcatggacttagtgaaatgtgacggtgcagcatttctttaccacgggaagtattacccgttgggtgttgctcctagtgaagttcagataaaagatgttgtggagtggttgcttgcgaatcatgcggattcaaccggattaagcactgatagtttaggcgatgcggggtatcccggtgcagctgcgttaggggatgctgtgtgcggtatggcagttgcatatatcacaaaaagagactttcttttttggtttcgatctcacactgcgaaagaaatcaaatggggaggcgctaagcatcatccggaggataaagatgatgggcaacgaatgcatcctcgttcgtcctttcaggcttttcttgaagttgttaagagccggagtcagccatgggaaactgcggaaatggatgcgattcactcgctccagcttattctgagagactcttttaaagaatctgaggcggctatgaactctaaagttgtggatggtgtggttcagccatgtagggatatggcgggggaacaggggattgatgagttaggtgcagttgcaagagagatggttaggctcattgagactgcaactgttcctatattcgctgtggatgccggaggctgcatcaatggatggaacgctaagattgcagagttgacaggtctctcagttgaagaagctatggggaagtctctggtttctgatttaatatacaaagagaatgaagcaactgtcaataagcttctttctcgtgctttgagaggggacgaggaaaagaatgtggaggttaagctgaaaactttcagccccgaactacaagggaaagcagtttttgtggttgtgaatgcttgttccagcaaggactacttgaacaacattgtcggcgtttgttttgttggacaagacgttactagtcagaaaatcgtaatggataagttcatcaacatacaaggagattacaaggctattgtacatagcccaaaccctctaatcccgccaatttttgctgctgacgagaacacgtgctgcctggaatggaacatggcgatggaaaagcttacgggttggtctcgcagtgaagtgattgggaaaatgattgtcggggaagtgtttgggagctgttgcatgctaaagggtcctgatgctttaaccaagttcatgattgtattgcataatgcgattggtggccaagatacggataagttccctttcccattctttgaccgcaatgggaagtttgttcaggctctattgactgcaaacaagcgggttagcctcgagggaaaggttattggggctttctgtttcttgcaaatcccgagccctgagctgcagcaagctttagcagtccaacggaggcaggacacagagtgtttcacgaaggcaaaagagttggcttatatttgtcaggtgataaagaatcctttgagcggtatgcgtttcgcaaactcattgttggaggccacagacttgaacgaggaccagaagcagttacttgaaacaagtgtttcttgcgagaaacagatctcaaggatcgtcggggacatggatcttgaaagcattgaagacggttcatttgtgctaaagagggaagagtttttccttggaagtgtcataaacgcgattgtaagtcaagcgatgttcttattaagggacagaggtcttcagctgatccgtgacattcccgaagagatcaaatcaatagaggtttttggagaccagataaggattcaacagctcctggctgagtttctgctgagtataatccggtatgcaccatctcaagagtgggtggagatccatttaagccaactttcaaagcaaatggctgatggattcgccgccatccgcacagaattcagaatggcgtgtccaggtgaaggtctgcctccagagctagtccgagacatgttccatagcagcaggtggacaagccctgaaggtttaggtctaagcgtatgtcgaaagattttaaagctaatgaacggtgaggttcaatacatccgagaatcagaacggtcctatttcctcatcattctggaactccctgtacctcgaaagcgaccattgtcaactgctagtggaagtggtgacatgatgctgatgatgccatattagatggtttccggagtcgggggtagtggcggtggccgtggcggtggccgtggcggagaagaagaaccgtcgtcaagtcacactcctaataaccgaagaggaggagaacaagctcaatcgtcgggaacgaaatctctcagaccaagaagcaacactgaatcaatgagcaaagcaattcaacagtacaccgtcgacgcaagactccacgccgttttcgaacaatccggcgaatcagggaaatcattcgactactcacaatcactcaaaacgacgacgtacggttcctctgtacctgagcaacagatcacagcttatctctctcgaatccagcgaggtggttacattcagcctttcggatgtatgatcgccgtcgatgaatccagtttccggatcatcggttacagtgaaaacgccagagaaatgttagggattatgcctcaatctgttcctactcttgagaaacctgagattctagctatgggaactgatgtgagatctttgttcacttcttcgagctcgattctactcgagcgtgctttcgttgctcgagagattaccttgttaaatccggtttggatccattccaagaatactggtaaaccgttttacgccattcttcataggattgatgttggtgttgttattgatttagagccagctagaactgaagatcctgcgctttctattgctggtgctgttcaatcgcagaaactcgcggttcgtgcgatttctcagttacaggctcttcctggtggagatattaagcttttgtgtgacactgtcgtggaaagtgtgagggacttgactggttatgatcgtgttatggtttataagtttcatgaagatgagcatggagaagttgtagctgagagtaaacgagatgatttagagccttatattggactgcatgttcctgctactgatattcctcaagcgtcaaggttcttgtttaagcagaaccgtgtccgaatgatagtagattgcaatgccacacctgttcttgtggtccaggacgataggctaactcagtctatgtgcttggttggttctactcttagggctcctcatggttgtcactctcagtatatggctaacatgggatctattgcgtctttagcaatggcggttataatcaatggaaatgaagatgatgggagcaatgtagctagtggaagaagctcgatgaggctttggggtttggttgtttgccatcacacttcttctcgctgcataccgtttccgctaaggtatgcttgtgagtttttgatgcaggctttcggtttacagttaaacatggaattgcagttagctttgcaaatgtcagagaaacgcgttttgagaacgcagacactgttatgtgatatgcttctgcgtgactcgcctgctggaattgttacacagagtcccagtatcatggacttagtgaaatgtgacggtgcagcatttctttaccacgggaagtattacccgttgggtgttgctcctagtgaagttcagataaaagatgttgtggagtggttgcttgcgaatcatgcggattcaaccggattaagcactgatagtttaggcgatgcggggtatcccggtgcagctgcgttaggggatgctgtgtgcggtatggcagttgcatatatcacaaaaagagactttcttttttggtttcgatctcacactgcgaaagaaatcaaatggggaggcgctaagcatcatccggaggataaagatgatgggcaacgaatgcatcctcgttcgtcctttcaggcttttcttgaagttgttaagagccggagtcagccatgggaaactgcggaaatggatgcgattcactcgctccagcttattctgagagactcttttaaagaatctgaggcggctatgaactctaaagttgtggatggtgtggttcagccatgtagggatatggcgggggaacaggggattgatgagttaggtgcagttgcaagagagatggttaggctcattgagactgcaactgttcctatattcgctgtggatgccggaggctgcatcaatggatggaacgctaagattgcagagttgacaggtctctcagttgaagaagctatggggaagtctctggtttctgatttaatatacaaagagaatgaagcaactgtcaataagcttctttctcgtgctttgagaggggacgaggaaaagaatgtggaggttaagctgaaaactttcagccccgaactacaagggaaagcagtttttgtggttgtgaatgcttgttccagcaaggactacttgaacaacattgtcggcgtttgttttgttggacaagacgttactagtcagaaaatcgtaatggataagttcatcaacatacaaggagattacaaggctattgtacatagcccaaaccctctaatcccgccaatttttgctgctgacgagaacacgtgctgcctggaatggaacatggcgatggaaaagcttacgggttggtctcgcagtgaagtgattgggaaaatgattgtcggggaagtgtttgggagctgttgcatgctaaagggtcctgatgctttaaccaagttcatgattgtattgcataatgcgattggtggccaagatacggataagttccctttcccattctttgaccgcaatgggaagtttgttcaggctctattgactgcaaacaagcgggttagcctcgagggaaaggttattggggctttctgtttcttgcaaatcccgagccctgagctgcagcaagctttagcagtccaacggaggcaggacacagagtgtttcacgaaggcaaaagagttggcttatatttgtcaggtgataaagaatcctttgagcggtatgcgtttcgcaaactcattgttggaggccacagacttgaacgaggaccagaagcagttacttgaaacaagtgtttcttgcgagaaacagatctcaaggatcgtcggggacatggatcttgaaagcattgaagacggttcatttgtgctaaagagggaagagtttttccttggaagtgtcataaacgcgattgtaagtcaagcgatgttcttattaagggacagaggtcttcagctgatccgtgacattcccgaagagatcaaatcaatagaggtttttggagaccagataaggattcaacagctcctggctgagtttctgctgagtataatccggtatgcaccatctcaagagtgggtggagatccatttaagccaactttcaaagcaaatggctgatggattcgccgccatccgcacagaattcagaatggcgtgtccaggtgaaggtctgcctccagagctagtccgagacatgttccatagcagcaggtggacaagccctgaaggtttaggtctaagcgtatgtcgaaagattttaaagctaatgaacggtgaggttcaatacatccgagaatcagaacggtcctatttcctcatcattctggaactccctgtacctcgaaagcgaccattgtcaactgctagtggaagtggtgacatgatgctgatgatgccatattagatggtttccggagtcgggggtagtggcggtggccgtggcggtggccgtggcggagaagaagaaccgtcgtcaagtcacactcctaataaccgaagaggaggagaacaagctcaatcgtcgggaacgaaatctctcagaccaagaagcaacactgaatcaatgagcaaagcaattcaacagtacaccgtcgacgcaagactccacgccgttttcgaacaatccggcgaatcagggaaatcattcgactactcacaatcactcaaaacgacgacgtacggttcctctgtacctgagcaacagatcacagcttatctctctcgaatccagcgaggtggttacattcagcctttcggatgtatgatcgccgtcgatgaatccagtttccggatcatcggttacagtgaaaacgccagagaaatgttagggattatgcctcaatctgttcctactcttgagaaacctgagattctagctatgggaactgatgtgagatctttgttcacttcttcgagctcgattctactcgagcgtgctttcgttgctcgagagattaccttgttaaatccggtttggatccattccaagaatactggtaaaccgttttacgccattcttcataggattgatgttggtgttgttattgatttagagccagctagaactgaagatcctgcgctttctattgctggtgctgttcaatcgcagaaactcgcggttcgtgcgatttctcagttacaggctcttcctggtggagatattaagcttttgtgtgacactgtcgtggaaagtgtgagggacttgactggttatgatcgtgttatggtttataagtttcatgaagatgagcatggagaagttgtagctgagagtaaacgagatgatttagagccttatattggactgcatgttcctgctactgatattcctcaagcgtcaaggttcttgtttaagcagaaccgtgtccgaatgatagtagattgcaatgccacacctgttcttgtggtccaggacgataggctaactcagtctatgtgcttggttggttctactcttagggctcctcatggttgtcactctcagtatatggctaacatgggatctattgcgtctttagcaatggcggttataatcaatggaaatgaagatgatgggagcaatgtagctagtggaagaagctcgatgaggctttggggtttggttgtttgccatcacacttcttctcgctgcataccgtttccgctaaggtatgcttgtgagtttttgatgcaggctttcggtttacagttaaacatggaattgcagttagctttgcaaatgtcagagaaacgcgttttgagaacgcagacactgttatgtgatatgcttctgcgtgactcgcctgctggaattgttacacagagtcccagtatcatggacttagtgaaatgtgacggtgcagcatttctttaccacgggaagtattacccgttgggtgttgctcctagtgaagttcagataaaagatgttgtggagtggttgcttgcgaatcatgcggattcaaccggattaagcactgatagtttaggcgatgcggggtatcccggtgcagctgcgttaggggatgctgtgtgcggtatggcagttgcatatatcacaaaaagagactttcttttttggtttcgatctcacactgcgaaagaaatcaaatggggaggcgctaagcatcatccggaggataaagatgatgggcaacgaatgcatcctcgttcgtcctttcaggcttttcttgaagttgttaagagccggagtcagccatgggaaactgcggaaatggatgcgattcactcgctccagcttattctgagagactcttttaaagaatctgaggcggctatgaactctaaagttgtggatggtgtggttcagccatgtagggatatggcgggggaacaggggattgatgagttaggtgcagttgcaagagagatggttaggctcattgagactgcaactgttcctatattcgctgtggatgccggaggctgcatcaatggatggaacgctaagattgcagagttgacaggtctctcagttgaagaagctatggggaagtctctggtttctgatttaatatacaaagagaatgaagcaactgtcaataagcttctttctcgtgctttgagaggggacgaggaaaagaatgtggaggttaagctgaaaactttcagccccgaactacaagggaaagcagtttttgtggttgtgaatgcttgttccagcaaggactacttgaacaacattgtcggcgtttgttttgttggacaagacgttactagtcagaaaatcgtaatggataagttcatcaacatacaaggagattacaaggctattgtacatagcccaaaccctctaatcccgccaatttttgctgctgacgagaacacgtgctgcctggaatggaacatggcgatggaaaagcttacgggttggtctcgcagtgaagtgattgggaaaatgattgtcggggaagtgtttgggagctgttgcatgctaaagggtcctgatgctttaaccaagttcatgattgtattgcataatgcgattggtggccaagatacggataagttccctttcccattctttgaccgcaatgggaagtttgttcaggctctattgactgcaaacaagcgggttagcctcgagggaaaggttattggggctttctgtttcttgcaaatcccgagccctgagctgcagcaagctttagcagtccaacggaggcaggacacagagtgtttcacgaaggcaaaagagttggcttatatttgtcaggtgataaagaatcctttgagcggtatgcgtttcgcaaactcattgttggaggccacagacttgaacgaggaccagaagcagttacttgaaacaagtgtttcttgcgagaaacagatctcaaggatcgtcggggacatggatcttgaaagcattgaagacggttcatttgtgctaaagagggaagagtttttccttggaagtgtcataaacgcgattgtaagtcaagcgatgttcttattaagggacagaggtcttcagctgatccgtgacattcccgaagagatcaaatcaatagaggtttttggagaccagataaggattcaacagctcctggctgagtttctgctgagtataatccggtatgcaccatctcaagagtgggtggagatccatttaagccaactttcaaagcaaatggctgatggattcgccgccatccgcacagaattcagaatggcgtgtccaggtgaaggtctgcctccagagctagtccgagacatgttccatagcagcaggtggacaagccctgaaggtttaggtctaagcgtatgtcgaaagattttaaagctaatgaacggtgaggttcaatacatccgagaatcagaacggtcctatttcctcatcattctggaactccctgtacctcgaaagcgaccattgtcaactgctagtggaagtggtgacatgatgctgatgatgccatattagatggtttccggagtcgggggtagtggcggtggccgtggcggtggccgtggcggagaagaagaaccgtcgtcaagtcacactcctaataaccgaagaggaggagaacaagctcaatcgtcgggaacgaaatctctcagaccaagaagcaacactgaatcaatgagcaaagcaattcaacagtacaccgtcgacgcaagactccacgccgttttcgaacaatccggcgaatcagggaaatcattcgactactcacaatcactcaaaacgacgacgtacggttcctctgtacctgagcaacagatcacagcttatctctctcgaatccagcgaggtggttacattcagcctttcggatgtatgatcgccgtcgatgaatccagtttccggatcatcggttacagtgaaaacgccagagaaatgttagggattatgcctcaatctgttcctactcttgagaaacctgagattctagctatgggaactgatgtgagatctttgttcacttcttcgagctcgattctactcgagcgtgctttcgttgctcgagagattaccttgttaaatccggtttggatccattccaagaatactggtaaaccgttttacgccattcttcataggattgatgttggtgttgttattgatttagagccagctagaactgaagatcctgcgctttctattgctggtgctgttcaatcgcagaaactcgcggttcgtgcgatttctcagttacaggctcttcctggtggagatattaagcttttgtgtgacactgtcgtggaaagtgtgagggacttgactggttatgatcgtgttatggtttataagtttcatgaagatgagcatggagaagttgtagctgagagtaaacgagatgatttagagccttatattggactgcatgttcctgctactgatattcctcaagcgtcaaggttcttgtttaagcagaaccgtgtccgaatgatagtagattgcaatgccacacctgttcttgtggtccaggacgataggctaactcagtctatgtgcttggttggttctactcttagggctcctcatggttgtcactctcagtatatggctaacatgggatctattgcgtctttagcaatggcggttataatcaatggaaatgaagatgatgggagcaatgtagctagtggaagaagctcgatgaggctttggggtttggttgtttgccatcacacttcttctcgctgcataccgtttccgctaaggtatgcttgtgagtttttgatgcaggctttcggtttacagttaaacatggaattgcagttagctttgcaaatgtcagagaaacgcgttttgagaacgcagacactgttatgtgatatgcttctgcgtgactcgcctgctggaattgttacacagagtcccagtatcatggacttagtgaaatgtgacggtgcagcatttctttaccacgggaagtattacccgttgggtgttgctcctagtgaagttcagataaaagatgttgtggagtggttgcttgcgaatcatgcggattcaaccggattaagcactgatagtttaggcgatgcggggtatcccggtgcagctgcgttaggggatgctgtgtgcggtatggcagttgcatatatcacaaaaagagactttcttttttggtttcgatctcacactgcgaaagaaatcaaatggggaggcgctaagcatcatccggaggataaagatgatgggcaacgaatgcatcctcgttcgtcctttcaggcttttcttgaagttgttaagagccggagtcagccatgggaaactgcggaaatggatgcgattcactcgctccagcttattctgagagactcttttaaagaatctgaggcggctatgaactctaaagttgtggatggtgtggttcagccatgtagggatatggcgggggaacaggggattgatgagttaggtgcagttgcaagagagatggttaggctcattgagactgcaactgttcctatattcgctgtggatgccggaggctgcatcaatggatggaacgctaagattgcagagttgacaggtctctcagttgaagaagctatggggaagtctctggtttctgatttaatatacaaagagaatgaagcaactgtcaataagcttctttctcgtgctttgagaggggacgaggaaaagaatgtggaggttaagctgaaaactttcagccccgaactacaagggaaagcagtttttgtggttgtgaatgcttgttccagcaaggactacttgaacaacattgtcggcgtttgttttgttggacaagacgttactagtcagaaaatcgtaatggataagttcatcaacatacaaggagattacaaggctattgtacatagcccaaaccctctaatcccgccaatttttgctgctgacgagaacacgtgctgcctggaatggaacatggcgatggaaaagcttacgggttggtctcgcagtgaagtgattgggaaaatgattgtcggggaagtgtttgggagctgttgcatgctaaagggtcctgatgctttaaccaagttcatgattgtattgcataatgcgattggtggccaagatacggataagttccctttcccattctttgaccgcaatgggaagtttgttcaggctctattgactgcaaacaagcgggttagcctcgagggaaaggttattggggctttctgtttcttgcaaatcccgagccctgagctgcagcaagctttagcagtccaacggaggcaggacacagagtgtttcacgaaggcaaaagagttggcttatatttgtcaggtgataaagaatcctttgagcggtatgcgtttcgcaaactcattgttggaggccacagacttgaacgaggaccagaagcagttacttgaaacaagtgtttcttgcgagaaacagatctcaaggatcgtcggggacatggatcttgaaagcattgaagacggttcatttgtgctaaagagggaagagtttttccttggaagtgtcataaacgcgattgtaagtcaagcgatgttcttattaagggacagaggtcttcagctgatccgtgacattcccgaagagatcaaatcaatagaggtttttggagaccagataaggattcaacagctcctggctgagtttctgctgagtataatccggtatgcaccatctcaagagtgggtggagatccatttaagccaactttcaaagcaaatggctgatggattcgccgccatccgcacagaattcagaatggcgtgtccaggtgaaggtctgcctccagagctagtccgagacatgttccatagcagcaggtggacaagccctgaaggtttaggtctaagcgtatgtcgaaagattttaaagctaatgaacggtgaggttcaatacatccgagaatcagaacggtcctatttcctcatcattctggaactccctgtacctcgaaagcgaccattgtcaactgctagtggaagtggtgacatgatgctgatgatgccatattagatggtttccggagtcgggggtagtggcggtggccgtggcggtggccgtggcggagaagaagaaccgtcgtcaagtcacactcctaataaccgaagaggaggagaacaagctcaatcgtcgggaacgaaatctctcagaccaagaagcaacactgaatcaatgagcaaagcaattcaacagtacaccgtcgacgcaagactccacgccgttttcgaacaatccggcgaatcagggaaatcattcgactactcacaatcactcaaaacgacgacgtacggttcctctgtacctgagcaacagatcacagcttatctctctcgaatccagcgaggtggttacattcagcctttcggatgtatgatcgccgtcgatgaatccagtttccggatcatcggttacagtgaaaacgccagagaaatgttagggattatgcctcaatctgttcctactcttgagaaacctgagattctagctatgggaactgatgtgagatctttgttcacttcttcgagctcgattctactcgagcgtgctttcgttgctcgagagattaccttgttaaatccggtttggatccattccaagaatactggtaaaccgttttacgccattcttcataggattgatgttggtgttgttattgatttagagccagctagaactgaagatcctgcgctttctattgctggtgctgttcaatcgcagaaactcgcggttcgtgcgatttctcagttacaggctcttcctggtggagatattaagcttttgtgtgacactgtcgtggaaagtgtgagggacttgactggttatgatcgtgttatggtttataagtttcatgaagatgagcatggagaagttgtagctgagagtaaacgagatgatttagagccttatattggactgcatgttcctgctactgatattcctcaagcgtcaaggttcttgtttaagcagaaccgtgtccgaatgatagtagattgcaatgccacacctgttcttgtggtccaggacgataggctaactcagtctatgtgcttggttggttctactcttagggctcctcatggttgtcactctcagtatatggctaacatgggatctattgcgtctttagcaatggcggttataatcaatggaaatgaagatgatgggagcaatgtagctagtggaagaagctcgatgaggctttggggtttggttgtttgccatcacacttcttctcgctgcataccgtttccgctaaggtatgcttgtgagtttttgatgcaggctttcggtttacagttaaacatggaattgcagttagctttgcaaatgtcagagaaacgcgttttgagaacgcagacactgttatgtgatatgcttctgcgtgactcgcctgctggaattgttacacagagtcccagtatcatggacttagtgaaatgtgacggtgcagcatttctttaccacgggaagtattacccgttgggtgttgctcctagtgaagttcagataaaagatgttgtggagtggttgcttgcgaatcatgcggattcaaccggattaagcactgatagtttaggcgatgcggggtatcccggtgcagctgcgttaggggatgctgtgtgcggtatggcagttgcatatatcacaaaaagagactttcttttttggtttcgatctcacactgcgaaagaaatcaaatggggaggcgctaagcatcatccggaggataaagatgatgggcaacgaatgcatcctcgttcgtcctttcaggcttttcttgaagttgttaagagccggagtcagccatgggaaactgcggaaatggatgcgattcactcgctccagcttattctgagagactcttttaaagaatctgaggcggctatgaactctaaagttgtggatggtgtggttcagccatgtagggatatggcgggggaacaggggattgatgagttaggtgcagttgcaagagagatggttaggctcattgagactgcaactgttcctatattcgctgtggatgccggaggctgcatcaatggatggaacgctaagattgcagagttgacaggtctctcagttgaagaagctatggggaagtctctggtttctgatttaatatacaaagagaatgaagcaactgtcaataagcttctttctcgtgctttgagaggggacgaggaaaagaatgtggaggttaagctgaaaactttcagccccgaactacaagggaaagcagtttttgtggttgtgaatgcttgttccagcaaggactacttgaacaacattgtcggcgtttgttttgttggacaagacgttactagtcagaaaatcgtaatggataagttcatcaacatacaaggagattacaaggctattgtacatagcccaaaccctctaatcccgccaatttttgctgctgacgagaacacgtgctgcctggaatggaacatggcgatggaaaagcttacgggttggtctcgcagtgaagtgattgggaaaatgattgtcggggaagtgtttgggagctgttgcatgctaaagggtcctgatgctttaaccaagttcatgattgtattgcataatgcgattggtggccaagatacggataagttccctttcccattctttgaccgcaatgggaagtttgttcaggctctattgactgcaaacaagcgggttagcctcgagggaaaggttattggggctttctgtttcttgcaaatcccgagccctgagctgcagcaagctttagcagtccaacggaggcaggacacagagtgtttcacgaaggcaaaagagttggcttatatttgtcaggtgataaagaatcctttgagcggtatgcgtttcgcaaactcattgttggaggccacagacttgaacgaggaccagaagcagttacttgaaacaagtgtttcttgcgagaaacagatctcaaggatcgtcggggacatggatcttgaaagcattgaagacggttcatttgtgctaaagagggaagagtttttccttggaagtgtcataaacgcgattgtaagtcaagcgatgttcttattaagggacagaggtcttcagctgatccgtgacattcccgaagagatcaaatcaatagaggtttttggagaccagataaggattcaacagctcctggctgagtttctgctgagtataatccggtatgcaccatctcaagagtgggtggagatccatttaagccaactttcaaagcaaatggctgatggattcgccgccatccgcacagaattcagaatggcgtgtccaggtgaaggtctgcctccagagctagtccgagacatgttccatagcagcaggtggacaagccctgaaggtttaggtctaagcgtatgtcgaaagattttaaagctaatgaacggtgaggttcaatacatccgagaatcagaacggtcctatttcctcatcattctggaactccctgtacctcgaaagcgaccattgtcaactgctagtggaagtggtgacatgatgctgatgatgccatattagatggtttccggagtcgggggtagtggcggtggccgtggcggtggccgtggcggagaagaagaaccgtcgtcaagtcacactcctaataaccgaagaggaggagaacaagctcaatcgtcgggaacgaaatctctcagaccaagaagcaacactgaatcaatgagcaaagcaattcaacagtacaccgtcgacgcaagactccacgccgttttcgaacaatccggcgaatcagggaaatcattcgactactcacaatcactcaaaacgacgacgtacggttcctctgtacctgagcaacagatcacagcttatctctctcgaatccagcgaggtggttacattcagcctttcggatgtatgatcgccgtcgatgaatccagtttccggatcatcggttacagtgaaaacgccagagaaatgttagggattatgcctcaatctgttcctactcttgagaaacctgagattctagctatgggaactgatgtgagatctttgttcacttcttcgagctcgattctactcgagcgtgctttcgttgctcgagagattaccttgttaaatccggtttggatccattccaagaatactggtaaaccgttttacgccattcttcataggattgatgttggtgttgttattgatttagagccagctagaactgaagatcctgcgctttctattgctggtgctgttcaatcgcagaaactcgcggttcgtgcgatttctcagttacaggctcttcctggtggagatattaagcttttgtgtgacactgtcgtggaaagtgtgagggacttgactggttatgatcgtgttatggtttataagtttcatgaagatgagcatggagaagttgtagctgagagtaaacgagatgatttagagccttatattggactgcatgttcctgctactgatattcctcaagcgtcaaggttcttgtttaagcagaaccgtgtccgaatgatagtagattgcaatgccacacctgttcttgtggtccaggacgataggctaactcagtctatgtgcttggttggttctactcttagggctcctcatggttgtcactctcagtatatggctaacatgggatctattgcgtctttagcaatggcggttataatcaatggaaatgaagatgatgggagcaatgtagctagtggaagaagctcgatgaggctttggggtttggttgtttgccatcacacttcttctcgctgcataccgtttccgctaaggtatgcttgtgagtttttgatgcaggctttcggtttacagttaaacatggaattgcagttagctttgcaaatgtcagagaaacgcgttttgagaacgcagacactgttatgtgatatgcttctgcgtgactcgcctgctggaattgttacacagagtcccagtatcatggacttagtgaaatgtgacggtgcagcatttctttaccacgggaagtattacccgttgggtgttgctcctagtgaagttcagataaaagatgttgtggagtggttgcttgcgaatcatgcggattcaaccggattaagcactgatagtttaggcgatgcggggtatcccggtgcagctgcgttaggggatgctgtgtgcggtatggcagttgcatatatcacaaaaagagactttcttttttggtttcgatctcacactgcgaaagaaatcaaatggggaggcgctaagcatcatccggaggataaagatgatgggcaacgaatgcatcctcgttcgtcctttcaggcttttcttgaagttgttaagagccggagtcagccatgggaaactgcggaaatggatgcgattcactcgctccagcttattctgagagactcttttaaagaatctgaggcggctatgaactctaaagttgtggatggtgtggttcagccatgtagggatatggcgggggaacaggggattgatgagttaggtgcagttgcaagagagatggttaggctcattgagactgcaactgttcctatattcgctgtggatgccggaggctgcatcaatggatggaacgctaagattgcagagttgacaggtctctcagttgaagaagctatggggaagtctctggtttctgatttaatatacaaagagaatgaagcaactgtcaataagcttctttctcgtgctttgagaggggacgaggaaaagaatgtggaggttaagctgaaaactttcagccccgaactacaagggaaagcagtttttgtggttgtgaatgcttgttccagcaaggactacttgaacaacattgtcggcgtttgttttgttggacaagacgttactagtcagaaaatcgtaatggataagttcatcaacatacaaggagattacaaggctattgtacatagcccaaaccctctaatcccgccaatttttgctgctgacgagaacacgtgctgcctggaatggaacatggcgatggaaaagcttacgggttggtctcgcagtgaagtgattgggaaaatgattgtcggggaagtgtttgggagctgttgcatgctaaagggtcctgatgctttaaccaagttcatgattgtattgcataatgcgattggtggccaagatacggataagttccctttcccattctttgaccgcaatgggaagtttgttcaggctctattgactgcaaacaagcgggttagcctcgagggaaaggttattggggctttctgtttcttgcaaatcccgagccctgagctgcagcaagctttagcagtccaacggaggcaggacacagagtgtttcacgaaggcaaaagagttggcttatatttgtcaggtgataaagaatcctttgagcggtatgcgtttcgcaaactcattgttggaggccacagacttgaacgaggaccagaagcagttacttgaaacaagtgtttcttgcgagaaacagatctcaaggatcgtcggggacatggatcttgaaagcattgaagacggttcatttgtgctaaagagggaagagtttttccttggaagtgtcataaacgcgattgtaagtcaagcgatgttcttattaagggacagaggtcttcagctgatccgtgacattcccgaagagatcaaatcaatagaggtttttggagaccagataaggattcaacagctcctggctgagtttctgctgagtataatccggtatgcaccatctcaagagtgggtggagatccatttaagccaactttcaaagcaaatggctgatggattcgccgccatccgcacagaattcagaatggcgtgtccaggtgaaggtctgcctccagagctagtccgagacatgttccatagcagcaggtggacaagccctgaaggtttaggtctaagcgtatgtcgaaagattttaaagctaatgaacggtgaggttcaatacatccgagaatcagaacggtcctatttcctcatcattctggaactccctgtacctcgaaagcgaccattgtcaactgctagtggaagtggtgacatgatgctgatgatgccatattagatggtttccggagtcgggggtagtggcggtggccgtggcggtggccgtggcggagaagaagaaccgtcgtcaagtcacactcctaataaccgaagaggaggagaacaagctcaatcgtcgggaacgaaatctctcagaccaagaagcaacactgaatcaatgagcaaagcaattcaacagtacaccgtcgacgcaagactccacgccgttttcgaacaatccggcgaatcagggaaatcattcgactactcacaatcactcaaaacgacgacgtacggttcctctgtacctgagcaacagatcacagcttatctctctcgaatccagcgaggtggttacattcagcctttcggatgtatgatcgccgtcgatgaatccagtttccggatcatcggttacagtgaaaacgccagagaaatgttagggattatgcctcaatctgttcctactcttgagaaacctgagattctagctatgggaactgatgtgagatctttgttcacttcttcgagctcgattctactcgagcgtgctttcgttgctcgagagattaccttgttaaatccggtttggatccattccaagaatactggtaaaccgttttacgccattcttcataggattgatgttggtgttgttattgatttagagccagctagaactgaagatcctgcgctttctattgctggtgctgttcaatcgcagaaactcgcggttcgtgcgatttctcagttacaggctcttcctggtggagatattaagcttttgtgtgacactgtcgtggaaagtgtgagggacttgactggttatgatcgtgttatggtttataagtttcatgaagatgagcatggagaagttgtagctgagagtaaacgagatgatttagagccttatattggactgcatgttcctgctactgatattcctcaagcgtcaaggttcttgtttaagcagaaccgtgtccgaatgatagtagattgcaatgccacacctgttcttgtggtccaggacgataggctaactcagtctatgtgcttggttggttctactcttagggctcctcatggttgtcactctcagtatatggctaacatgggatctattgcgtctttagcaatggcggttataatcaatggaaatgaagatgatgggagcaatgtagctagtggaagaagctcgatgaggctttggggtttggttgtttgccatcacacttcttctcgctgcataccgtttccgctaaggtatgcttgtgagtttttgatgcaggctttcggtttacagttaaacatggaattgcagttagctttgcaaatgtcagagaaacgcgttttgagaacgcagacactgttatgtgatatgcttctgcgtgactcgcctgctggaattgttacacagagtcccagtatcatggacttagtgaaatgtgacggtgcagcatttctttaccacgggaagtattacccgttgggtgttgctcctagtgaagttcagataaaagatgttgtggagtggttgcttgcgaatcatgcggattcaaccggattaagcactgatagtttaggcgatgcggggtatcccggtgcagctgcgttaggggatgctgtgtgcggtatggcagttgcatatatcacaaaaagagactttcttttttggtttcgatctcacactgcgaaagaaatcaaatggggaggcgctaagcatcatccggaggataaagatgatgggcaacgaatgcatcctcgttcgtcctttcaggcttttcttgaagttgttaagagccggagtcagccatgggaaactgcggaaatggatgcgattcactcgctccagcttattctgagagactcttttaaagaatctgaggcggctatgaactctaaagttgtggatggtgtggttcagccatgtagggatatggcgggggaacaggggattgatgagttaggtgcagttgcaagagagatggttaggctcattgagactgcaactgttcctatattcgctgtggatgccggaggctgcatcaatggatggaacgctaagattgcagagttgacaggtctctcagttgaagaagctatggggaagtctctggtttctgatttaatatacaaagagaatgaagcaactgtcaataagcttctttctcgtgctttgagaggggacgaggaaaagaatgtggaggttaagctgaaaactttcagccccgaactacaagggaaagcagtttttgtggttgtgaatgcttgttccagcaaggactacttgaacaacattgtcggcgtttgttttgttggacaagacgttactagtcagaaaatcgtaatggataagttcatcaacatacaaggagattacaaggctattgtacatagcccaaaccctctaatcccgccaatttttgctgctgacgagaacacgtgctgcctggaatggaacatggcgatggaaaagcttacgggttggtctcgcagtgaagtgattgggaaaatgattgtcggggaagtgtttgggagctgttgcatgctaaagggtcctgatgctttaaccaagttcatgattgtattgcataatgcgattggtggccaagatacggataagttccctttcccattctttgaccgcaatgggaagtttgttcaggctctattgactgcaaacaagcgggttagcctcgagggaaaggttattggggctttctgtttcttgcaaatcccgagccctgagctgcagcaagctttagcagtccaacggaggcaggacacagagtgtttcacgaaggcaaaagagttggcttatatttgtcaggtgataaagaatcctttgagcggtatgcgtttcgcaaactcattgttggaggccacagacttgaacgaggaccagaagcagttacttgaaacaagtgtttcttgcgagaaacagatctcaaggatcgtcggggacatggatcttgaaagcattgaagacggttcatttgtgctaaagagggaagagtttttccttggaagtgtcataaacgcgattgtaagtcaagcgatgttcttattaagggacagaggtcttcagctgatccgtgacattcccgaagagatcaaatcaatagaggtttttggagaccagataaggattcaacagctcctggctgagtttctgctgagtataatccggtatgcaccatctcaagagtgggtggagatccatttaagccaactttcaaagcaaatggctgatggattcgccgccatccgcacagaattcagaatggcgtgtccaggtgaaggtctgcctccagagctagtccgagacatgttccatagcagcaggtggacaagccctgaaggtttaggtctaagcgtatgtcgaaagattttaaagctaatgaacggtgaggttcaatacatccgagaatcagaacggtcctatttcctcatcattctggaactccctgtacctcgaaagcgaccattgtcaactgctagtggaagtggtgacatgatgctgatgatgccatattagatggtttccggagtcgggggtagtggcggtggccgtggcggtggccgtggcggagaagaagaaccgtcgtcaagtcacactcctaataaccgaagaggaggagaacaagctcaatcgtcgggaacgaaatctctcagaccaagaagcaacactgaatcaatgagcaaagcaattcaacagtacaccgtcgacgcaagactccacgccgttttcgaacaatccggcgaatcagggaaatcattcgactactcacaatcactcaaaacgacgacgtacggttcctctgtacctgagcaacagatcacagcttatctctctcgaatccagcgaggtggttacattcagcctttcggatgtatgatcgccgtcgatgaatccagtttccggatcatcggttacagtgaaaacgccagagaaatgttagggattatgcctcaatctgttcctactcttgagaaacctgagattctagctatgggaactgatgtgagatctttgttcacttcttcgagctcgattctactcgagcgtgctttcgttgctcgagagattaccttgttaaatccggtttggatccattccaagaatactggtaaaccgttttacgccattcttcataggattgatgttggtgttgttattgatttagagccagctagaactgaagatcctgcgctttctattgctggtgctgttcaatcgcagaaactcgcggttcgtgcgatttctcagttacaggctcttcctggtggagatattaagcttttgtgtgacactgtcgtggaaagtgtgagggacttgactggttatgatcgtgttatggtttataagtttcatgaagatgagcatggagaagttgtagctgagagtaaacgagatgatttagagccttatattggactgcatgttcctgctactgatattcctcaagcgtcaaggttcttgtttaagcagaaccgtgtccgaatgatagtagattgcaatgccacacctgttcttgtggtccaggacgataggctaactcagtctatgtgcttggttggttctactcttagggctcctcatggttgtcactctcagtatatggctaacatgggatctattgcgtctttagcaatggcggttataatcaatggaaatgaagatgatgggagcaatgtagctagtggaagaagctcgatgaggctttggggtttggttgtttgccatcacacttcttctcgctgcataccgtttccgctaaggtatgcttgtgagtttttgatgcaggctttcggtttacagttaaacatggaattgcagttagctttgcaaatgtcagagaaacgcgttttgagaacgcagacactgttatgtgatatgcttctgcgtgactcgcctgctggaattgttacacagagtcccagtatcatggacttagtgaaatgtgacggtgcagcatttctttaccacgggaagtattacccgttgggtgttgctcctagtgaagttcagataaaagatgttgtggagtggttgcttgcgaatcatgcggattcaaccggattaagcactgatagtttaggcgatgcggggtatcccggtgcagctgcgttaggggatgctgtgtgcggtatggcagttgcatatatcacaaaaagagactttcttttttggtttcgatctcacactgcgaaagaaatcaaatggggaggcgctaagcatcatccggaggataaagatgatgggcaacgaatgcatcctcgttcgtcctttcaggcttttcttgaagttgttaagagccggagtcagccatgggaaactgcggaaatggatgcgattcactcgctccagcttattctgagagactcttttaaagaatctgaggcggctatgaactctaaagttgtggatggtgtggttcagccatgtagggatatggcgggggaacaggggattgatgagttaggtgcagttgcaagagagatggttaggctcattgagactgcaactgttcctatattcgctgtggatgccggaggctgcatcaatggatggaacgctaagattgcagagttgacaggtctctcagttgaagaagctatggggaagtctctggtttctgatttaatatacaaagagaatgaagcaactgtcaataagcttctttctcgtgctttgagaggggacgaggaaaagaatgtggaggttaagctgaaaactttcagccccgaactacaagggaaagcagtttttgtggttgtgaatgcttgttccagcaaggactacttgaacaacattgtcggcgtttgttttgttggacaagacgttactagtcagaaaatcgtaatggataagttcatcaacatacaaggagattacaaggctattgtacatagcccaaaccctctaatcccgccaatttttgctgctgacgagaacacgtgctgcctggaatggaacatggcgatggaaaagcttacgggttggtctcgcagtgaagtgattgggaaaatgattgtcggggaagtgtttgggagctgttgcatgctaaagggtcctgatgctttaaccaagttcatgattgtattgcataatgcgattggtggccaagatacggataagttccctttcccattctttgaccgcaatgggaagtttgttcaggctctattgactgcaaacaagcgggttagcctcgagggaaaggttattggggctttctgtttcttgcaaatcccgagccctgagctgcagcaagctttagcagtccaacggaggcaggacacagagtgtttcacgaaggcaaaagagttggcttatatttgtcaggtgataaagaatcctttgagcggtatgcgtttcgcaaactcattgttggaggccacagacttgaacgaggaccagaagcagttacttgaaacaagtgtttcttgcgagaaacagatctcaaggatcgtcggggacatggatcttgaaagcattgaagacggttcatttgtgctaaagagggaagagtttttccttggaagtgtcataaacgcgattgtaagtcaagcgatgttcttattaagggacagaggtcttcagctgatccgtgacattcccgaagagatcaaatcaatagaggtttttggagaccagataaggattcaacagctcctggctgagtttctgctgagtataatccggtatgcaccatctcaagagtgggtggagatccatttaagccaactttcaaagcaaatggctgatggattcgccgccatccgcacagaattcagaatggcgtgtccaggtgaaggtctgcctccagagctagtccgagacatgttccatagcagcaggtggacaagccctgaaggtttaggtctaagcgtatgtcgaaagattttaaagctaatgaacggtgaggttcaatacatccgagaatcagaacggtcctatttcctcatcattctggaactccctgtacctcgaaagcgaccattgtcaactgctagtggaagtggtgacatgatgctgatgatgccatattagatggtttccggagtcgggggtagtggcggtggccgtggcggtggccgtggcggagaagaagaaccgtcgtcaagtcacactcctaataaccgaagaggaggagaacaagctcaatcgtcgggaacgaaatctctcagaccaagaagcaacactgaatcaatgagcaaagcaattcaacagtacaccgtcgacgcaagactccacgccgttttcgaacaatccggcgaatcagggaaatcattcgactactcacaatcactcaaaacgacgacgtacggttcctctgtacctgagcaacagatcacagcttatctctctcgaatccagcgaggtggttacattcagcctttcggatgtatgatcgccgtcgatgaatccagtttccggatcatcggttacagtgaaaacgccagagaaatgttagggattatgcctcaatctgttcctactcttgagaaacctgagattctagctatgggaactgatgtgagatctttgttcacttcttcgagctcgattctactcgagcgtgctttcgttgctcgagagattaccttgttaaatccggtttggatccattccaagaatactggtaaaccgttttacgccattcttcataggattgatgttggtgttgttattgatttagagccagctagaactgaagatcctgcgctttctattgctggtgctgttcaatcgcagaaactcgcggttcgtgcgatttctcagttacaggctcttcctggtggagatattaagcttttgtgtgacactgtcgtggaaagtgtgagggacttgactggttatgatcgtgttatggtttataagtttcatgaagatgagcatggagaagttgtagctgagagtaaacgagatgatttagagccttatattggactgcatgttcctgctactgatattcctcaagcgtcaaggttcttgtttaagcagaaccgtgtccgaatgatagtagattgcaatgccacacctgttcttgtggtccaggacgataggctaactcagtctatgtgcttggttggttctactcttagggctcctcatggttgtcactctcagtatatggctaacatgggatctattgcgtctttagcaatggcggttataatcaatggaaatgaagatgatgggagcaatgtagctagtggaagaagctcgatgaggctttggggtttggttgtttgccatcacacttcttctcgctgcataccgtttccgctaaggtatgcttgtgagtttttgatgcaggctttcggtttacagttaaacatggaattgcagttagctttgcaaatgtcagagaaacgcgttttgagaacgcagacactgttatgtgatatgcttctgcgtgactcgcctgctggaattgttacacagagtcccagtatcatggacttagtgaaatgtgacggtgcagcatttctttaccacgggaagtattacccgttgggtgttgctcctagtgaagttcagataaaagatgttgtggagtggttgcttgcgaatcatgcggattcaaccggattaagcactgatagtttaggcgatgcggggtatcccggtgcagctgcgttaggggatgctgtgtgcggtatggcagttgcatatatcacaaaaagagactttcttttttggtttcgatctcacactgcgaaagaaatcaaatggggaggcgctaagcatcatccggaggataaagatgatgggcaacgaatgcatcctcgttcgtcctttcaggcttttcttgaagttgttaagagccggagtcagccatgggaaactgcggaaatggatgcgattcactcgctccagcttattctgagagactcttttaaagaatctgaggcggctatgaactctaaagttgtggatggtgtggttcagccatgtagggatatggcgggggaacaggggattgatgagttaggtgcagttgcaagagagatggttaggctcattgagactgcaactgttcctatattcgctgtggatgccggaggctgcatcaatggatggaacgctaagattgcagagttgacaggtctctcagttgaagaagctatggggaagtctctggtttctgatttaatatacaaagagaatgaagcaactgtcaataagcttctttctcgtgctttgagaggggacgaggaaaagaatgtggaggttaagctgaaaactttcagccccgaactacaagggaaagcagtttttgtggttgtgaatgcttgttccagcaaggactacttgaacaacattgtcggcgtttgttttgttggacaagacgttactagtcagaaaatcgtaatggataagttcatcaacatacaaggagattacaaggctattgtacatagcccaaaccctctaatcccgccaatttttgctgctgacgagaacacgtgctgcctggaatggaacatggcgatggaaaagcttacgggttggtctcgcagtgaagtgattgggaaaatgattgtcggggaagtgtttgggagctgttgcatgctaaagggtcctgatgctttaaccaagttcatgattgtattgcataatgcgattggtggccaagatacggataagttccctttcccattctttgaccgcaatgggaagtttgttcaggctctattgactgcaaacaagcgggttagcctcgagggaaaggttattggggctttctgtttcttgcaaatcccgagccctgagctgcagcaagctttagcagtccaacggaggcaggacacagagtgtttcacgaaggcaaaagagttggcttatatttgtcaggtgataaagaatcctttgagcggtatgcgtttcgcaaactcattgttggaggccacagacttgaacgaggaccagaagcagttacttgaaacaagtgtttcttgcgagaaacagatctcaaggatcgtcggggacatggatcttgaaagcattgaagacggttcatttgtgctaaagagggaagagtttttccttggaagtgtcataaacgcgattgtaagtcaagcgatgttcttattaagggacagaggtcttcagctgatccgtgacattcccgaagagatcaaatcaatagaggtttttggagaccagataaggattcaacagctcctggctgagtttctgctgagtataatccggtatgcaccatctcaagagtgggtggagatccatttaagccaactttcaaagcaaatggctgatggattcgccgccatccgcacagaattcagaatggcgtgtccaggtgaaggtctgcctccagagctagtccgagacatgttccatagcagcaggtggacaagccctgaaggtttaggtctaagcgtatgtcgaaagattttaaagctaatgaacggtgaggttcaatacatccgagaatcagaacggtcctatttcctcatcattctggaactccctgtacctcgaaagcgaccattgtcaactgctagtggaagtggtgacatgatgctgatgatgccatattagatggtttccggagtcgggggtagtggcggtggccgtggcggtggccgtggcggagaagaagaaccgtcgtcaagtcacactcctaataaccgaagaggaggagaacaagctcaatcgtcgggaacgaaatctctcagaccaagaagcaacactgaatcaatgagcaaagcaattcaacagtacaccgtcgacgcaagactccacgccgttttcgaacaatccggcgaatcagggaaatcattcgactactcacaatcactcaaaacgacgacgtacggttcctctgtacctgagcaacagatcacagcttatctctctcgaatccagcgaggtggttacattcagcctttcggatgtatgatcgccgtcgatgaatccagtttccggatcatcggttacagtgaaaacgccagagaaatgttagggattatgcctcaatctgttcctactcttgagaaacctgagattctagctatgggaactgatgtgagatctttgttcacttcttcgagctcgattctactcgagcgtgctttcgttgctcgagagattaccttgttaaatccggtttggatccattccaagaatactggtaaaccgttttacgccattcttcataggattgatgttggtgttgttattgatttagagccagctagaactgaagatcctgcgctttctattgctggtgctgttcaatcgcagaaactcgcggttcgtgcgatttctcagttacaggctcttcctggtggagatattaagcttttgtgtgacactgtcgtggaaagtgtgagggacttgactggttatgatcgtgttatggtttataagtttcatgaagatgagcatggagaagttgtagctgagagtaaacgagatgatttagagccttatattggactgcatgttcctgctactgatattcctcaagcgtcaaggttcttgtttaagcagaaccgtgtccgaatgatagtagattgcaatgccacacctgttcttgtggtccaggacgataggctaactcagtctatgtgcttggttggttctactcttagggctcctcatggttgtcactctcagtatatggctaacatgggatctattgcgtctttagcaatggcggttataatcaatggaaatgaagatgatgggagcaatgtagctagtggaagaagctcgatgaggctttggggtttggttgtttgccatcacacttcttctcgctgcataccgtttccgctaaggtatgcttgtgagtttttgatgcaggctttcggtttacagttaaacatggaattgcagttagctttgcaaatgtcagagaaacgcgttttgagaacgcagacactgttatgtgatatgcttctgcgtgactcgcctgctggaattgttacacagagtcccagtatcatggacttagtgaaatgtgacggtgcagcatttctttaccacgggaagtattacccgttgggtgttgctcctagtgaagttcagataaaagatgttgtggagtggttgcttgcgaatcatgcggattcaaccggattaagcactgatagtttaggcgatgcggggtatcccggtgcagctgcgttaggggatgctgtgtgcggtatggcagttgcatatatcacaaaaagagactttcttttttggtttcgatctcacactgcgaaagaaatcaaatggggaggcgctaagcatcatccggaggataaagatgatgggcaacgaatgcatcctcgttcgtcctttcaggcttttcttgaagttgttaagagccggagtcagccatgggaaactgcggaaatggatgcgattcactcgctccagcttattctgagagactcttttaaagaatctgaggcggctatgaactctaaagttgtggatggtgtggttcagccatgtagggatatggcgggggaacaggggattgatgagttaggtgcagttgcaagagagatggttaggctcattgagactgcaactgttcctatattcgctgtggatgccggaggctgcatcaatggatggaacgctaagattgcagagttgacaggtctctcagttgaagaagctatggggaagtctctggtttctgatttaatatacaaagagaatgaagcaactgtcaataagcttctttctcgtgctttgagaggggacgaggaaaagaatgtggaggttaagctgaaaactttcagccccgaactacaagggaaagcagtttttgtggttgtgaatgcttgttccagcaaggactacttgaacaacattgtcggcgtttgttttgttggacaagacgttactagtcagaaaatcgtaatggataagttcatcaacatacaaggagattacaaggctattgtacatagcccaaaccctctaatcccgccaatttttgctgctgacgagaacacgtgctgcctggaatggaacatggcgatggaaaagcttacgggttggtctcgcagtgaagtgattgggaaaatgattgtcggggaagtgtttgggagctgttgcatgctaaagggtcctgatgctttaaccaagttcatgattgtattgcataatgcgattggtggccaagatacggataagttccctttcccattctttgaccgcaatgggaagtttgttcaggctctattgactgcaaacaagcgggttagcctcgagggaaaggttattggggctttctgtttcttgcaaatcccgagccctgagctgcagcaagctttagcagtccaacggaggcaggacacagagtgtttcacgaaggcaaaagagttggcttatatttgtcaggtgataaagaatcctttgagcggtatgcgtttcgcaaactcattgttggaggccacagacttgaacgaggaccagaagcagttacttgaaacaagtgtttcttgcgagaaacagatctcaaggatcgtcggggacatggatcttgaaagcattgaagacggttcatttgtgctaaagagggaagagtttttccttggaagtgtcataaacgcgattgtaagtcaagcgatgttcttattaagggacagaggtcttcagctgatccgtgacattcccgaagagatcaaatcaatagaggtttttggagaccagataaggattcaacagctcctggctgagtttctgctgagtataatccggtatgcaccatctcaagagtgggtggagatccatttaagccaactttcaaagcaaatggctgatggattcgccgccatccgcacagaattcagaatggcgtgtccaggtgaaggtctgcctccagagctagtccgagacatgttccatagcagcaggtggacaagccctgaaggtttaggtctaagcgtatgtcgaaagattttaaagctaatgaacggtgaggttcaatacatccgagaatcagaacggtcctatttcctcatcattctggaactccctgtacctcgaaagcgaccattgtcaactgctagtggaagtggtgacatgatgctgatgatgccatattagatggtttccggagtcgggggtagtggcggtggccgtggcggtggccgtggcggagaagaagaaccgtcgtcaagtcacactcctaataaccgaagaggaggagaacaagctcaatcgtcgggaacgaaatctctcagaccaagaagcaacactgaatcaatgagcaaagcaattcaacagtacaccgtcgacgcaagactccacgccgttttcgaacaatccggcgaatcagggaaatcattcgactactcacaatcactcaaaacgacgacgtacggttcctctgtacctgagcaacagatcacagcttatctctctcgaatccagcgaggtggttacattcagcctttcggatgtatgatcgccgtcgatgaatccagtttccggatcatcggttacagtgaaaacgccagagaaatgttagggattatgcctcaatctgttcctactcttgagaaacctgagattctagctatgggaactgatgtgagatctttgttcacttcttcgagctcgattctactcgagcgtgctttcgttgctcgagagattaccttgttaaatccggtttggatccattccaagaatactggtaaaccgttttacgccattcttcataggattgatgttggtgttgttattgatttagagccagctagaactgaagatcctgcgctttctattgctggtgctgttcaatcgcagaaactcgcggttcgtgcgatttctcagttacaggctcttcctggtggagatattaagcttttgtgtgacactgtcgtggaaagtgtgagggacttgactggttatgatcgtgttatggtttataagtttcatgaagatgagcatggagaagttgtagctgagagtaaacgagatgatttagagccttatattggactgcatgttcctgctactgatattcctcaagcgtcaaggttcttgtttaagcagaaccgtgtccgaatgatagtagattgcaatgccacacctgttcttgtggtccaggacgataggctaactcagtctatgtgcttggttggttctactcttagggctcctcatggttgtcactctcagtatatggctaacatgggatctattgcgtctttagcaatggcggttataatcaatggaaatgaagatgatgggagcaatgtagctagtggaagaagctcgatgaggctttggggtttggttgtttgccatcacacttcttctcgctgcataccgtttccgctaaggtatgcttgtgagtttttgatgcaggctttcggtttacagttaaacatggaattgcagttagctttgcaaatgtcagagaaacgcgttttgagaacgcagacactgttatgtgatatgcttctgcgtgactcgcctgctggaattgttacacagagtcccagtatcatggacttagtgaaatgtgacggtgcagcatttctttaccacgggaagtattacccgttgggtgttgctcctagtgaagttcagataaaagatgttgtggagtggttgcttgcgaatcatgcggattcaaccggattaagcactgatagtttaggcgatgcggggtatcccggtgcagctgcgttaggggatgctgtgtgcggtatggcagttgcatatatcacaaaaagagactttcttttttggtttcgatctcacactgcgaaagaaatcaaatggggaggcgctaagcatcatccggaggataaagatgatgggcaacgaatgcatcctcgttcgtcctttcaggcttttcttgaagttgttaagagccggagtcagccatgggaaactgcggaaatggatgcgattcactcgctccagcttattctgagagactcttttaaagaatctgaggcggctatgaactctaaagttgtggatggtgtggttcagccatgtagggatatggcgggggaacaggggattgatgagttaggtgcagttgcaagagagatggttaggctcattgagactgcaactgttcctatattcgctgtggatgccggaggctgcatcaatggatggaacgctaagattgcagagttgacaggtctctcagttgaagaagctatggggaagtctctggtttctgatttaatatacaaagagaatgaagcaactgtcaataagcttctttctcgtgctttgagaggggacgaggaaaagaatgtggaggttaagctgaaaactttcagccccgaactacaagggaaagcagtttttgtggttgtgaatgcttgttccagcaaggactacttgaacaacattgtcggcgtttgttttgttggacaagacgttactagtcagaaaatcgtaatggataagttcatcaacatacaaggagattacaaggctattgtacatagcccaaaccctctaatcccgccaatttttgctgctgacgagaacacgtgctgcctggaatggaacatggcgatggaaaagcttacgggttggtctcgcagtgaagtgattgggaaaatgattgtcggggaagtgtttgggagctgttgcatgctaaagggtcctgatgctttaaccaagttcatgattgtattgcataatgcgattggtggccaagatacggataagttccctttcccattctttgaccgcaatgggaagtttgttcaggctctattgactgcaaacaagcgggttagcctcgagggaaaggttattggggctttctgtttcttgcaaatcccgagccctgagctgcagcaagctttagcagtccaacggaggcaggacacagagtgtttcacgaaggcaaaagagttggcttatatttgtcaggtgataaagaatcctttgagcggtatgcgtttcgcaaactcattgttggaggccacagacttgaacgaggaccagaagcagttacttgaaacaagtgtttcttgcgagaaacagatctcaaggatcgtcggggacatggatcttgaaagcattgaagacggttcatttgtgctaaagagggaagagtttttccttggaagtgtcataaacgcgattgtaagtcaagcgatgttcttattaagggacagaggtcttcagctgatccgtgacattcccgaagagatcaaatcaatagaggtttttggagaccagataaggattcaacagctcctggctgagtttctgctgagtataatccggtatgcaccatctcaagagtgggtggagatccatttaagccaactttcaaagcaaatggctgatggattcgccgccatccgcacagaattcagaatggcgtgtccaggtgaaggtctgcctccagagctagtccgagacatgttccatagcagcaggtggacaagccctgaaggtttaggtctaagcgtatgtcgaaagattttaaagctaatgaacggtgaggttcaatacatccgagaatcagaacggtcctatttcctcatcattctggaactccctgtacctcgaaagcgaccattgtcaactgctagtggaagtggtgacatgatgctgatgatgccatattagatggtttccggagtcgggggtagtggcggtggccgtggcggtggccgtggcggagaagaagaaccgtcgtcaagtcacactcctaataaccgaagaggaggagaacaagctcaatcgtcgggaacgaaatctctcagaccaagaagcaacactgaatcaatgagcaaagcaattcaacagtacaccgtcgacgcaagactccacgccgttttcgaacaatccggcgaatcagggaaatcattcgactactcacaatcactcaaaacgacgacgtacggttcctctgtacctgagcaacagatcacagcttatctctctcgaatccagcgaggtggttacattcagcctttcggatgtatgatcgccgtcgatgaatccagtttccggatcatcggttacagtgaaaacgccagagaaatgttagggattatgcctcaatctgttcctactcttgagaaacctgagattctagctatgggaactgatgtgagatctttgttcacttcttcgagctcgattctactcgagcgtgctttcgttgctcgagagattaccttgttaaatccggtttggatccattccaagaatactggtaaaccgttttacgccattcttcataggattgatgttggtgttgttattgatttagagccagctagaactgaagatcctgcgctttctattgctggtgctgttcaatcgcagaaactcgcggttcgtgcgatttctcagttacaggctcttcctggtggagatattaagcttttgtgtgacactgtcgtggaaagtgtgagggacttgactggttatgatcgtgttatggtttataagtttcatgaagatgagcatggagaagttgtagctgagagtaaacgagatgatttagagccttatattggactgcatgttcctgctactgatattcctcaagcgtcaaggttcttgtttaagcagaaccgtgtccgaatgatagtagattgcaatgccacacctgttcttgtggtccaggacgataggctaactcagtctatgtgcttggttggttctactcttagggctcctcatggttgtcactctcagtatatggctaacatgggatctattgcgtctttagcaatggcggttataatcaatggaaatgaagatgatgggagcaatgtagctagtggaagaagctcgatgaggctttggggtttggttgtttgccatcacacttcttctcgctgcataccgtttccgctaaggtatgcttgtgagtttttgatgcaggctttcggtttacagttaaacatggaattgcagttagctttgcaaatgtcagagaaacgcgttttgagaacgcagacactgttatgtgatatgcttctgcgtgactcgcctgctggaattgttacacagagtcccagtatcatggacttagtgaaatgtgacggtgcagcatttctttaccacgggaagtattacccgttgggtgttgctcctagtgaagttcagataaaagatgttgtggagtggttgcttgcgaatcatgcggattcaaccggattaagcactgatagtttaggcgatgcggggtatcccggtgcagctgcgttaggggatgctgtgtgcggtatggcagttgcatatatcacaaaaagagactttcttttttggtttcgatctcacactgcgaaagaaatcaaatggggaggcgctaagcatcatccggaggataaagatgatgggcaacgaatgcatcctcgttcgtcctttcaggcttttcttgaagttgttaagagccggagtcagccatgggaaactgcggaaatggatgcgattcactcgctccagcttattctgagagactcttttaaagaatctgaggcggctatgaactctaaagttgtggatggtgtggttcagccatgtagggatatggcgggggaacaggggattgatgagttaggtgcagttgcaagagagatggttaggctcattgagactgcaactgttcctatattcgctgtggatgccggaggctgcatcaatggatggaacgctaagattgcagagttgacaggtctctcagttgaagaagctatggggaagtctctggtttctgatttaatatacaaagagaatgaagcaactgtcaataagcttctttctcgtgctttgagaggggacgaggaaaagaatgtggaggttaagctgaaaactttcagccccgaactacaagggaaagcagtttttgtggttgtgaatgcttgttccagcaaggactacttgaacaacattgtcggcgtttgttttgttggacaagacgttactagtcagaaaatcgtaatggataagttcatcaacatacaaggagattacaaggctattgtacatagcccaaaccctctaatcccgccaatttttgctgctgacgagaacacgtgctgcctggaatggaacatggcgatggaaaagcttacgggttggtctcgcagtgaagtgattgggaaaatgattgtcggggaagtgtttgggagctgttgcatgctaaagggtcctgatgctttaaccaagttcatgattgtattgcataatgcgattggtggccaagatacggataagttccctttcccattctttgaccgcaatgggaagtttgttcaggctctattgactgcaaacaagcgggttagcctcgagggaaaggttattggggctttctgtttcttgcaaatcccgagccctgagctgcagcaagctttagcagtccaacggaggcaggacacagagtgtttcacgaaggcaaaagagttggcttatatttgtcaggtgataaagaatcctttgagcggtatgcgtttcgcaaactcattgttggaggccacagacttgaacgaggaccagaagcagttacttgaaacaagtgtttcttgcgagaaacagatctcaaggatcgtcggggacatggatcttgaaagcattgaagacggttcatttgtgctaaagagggaagagtttttccttggaagtgtcataaacgcgattgtaagtcaagcgatgttcttattaagggacagaggtcttcagctgatccgtgacattcccgaagagatcaaatcaatagaggtttttggagaccagataaggattcaacagctcctggctgagtttctgctgagtataatccggtatgcaccatctcaagagtgggtggagatccatttaagccaactttcaaagcaaatggctgatggattcgccgccatccgcacagaattcagaatggcgtgtccaggtgaaggtctgcctccagagctagtccgagacatgttccatagcagcaggtggacaagccctgaaggtttaggtctaagcgtatgtcgaaagattttaaagctaatgaacggtgaggttcaatacatccgagaatcagaacggtcctatttcctcatcattctggaactccctgtacctcgaaagcgaccattgtcaactgctagtggaagtggtgacatgatgctgatgatgccatattagatggtttccggagtcgggggtagtggcggtggccgtggcggtggccgtggcggagaagaagaaccgtcgtcaagtcacactcctaataaccgaagaggaggagaacaagctcaatcgtcgggaacgaaatctctcagaccaagaagcaacactgaatcaatgagcaaagcaattcaacagtacaccgtcgacgcaagactccacgccgttttcgaacaatccggcgaatcagggaaatcattcgactactcacaatcactcaaaacgacgacgtacggttcctctgtacctgagcaacagatcacagcttatctctctcgaatccagcgaggtggttacattcagcctttcggatgtatgatcgccgtcgatgaatccagtttccggatcatcggttacagtgaaaacgccagagaaatgttagggattatgcctcaatctgttcctactcttgagaaacctgagattctagctatgggaactgatgtgagatctttgttcacttcttcgagctcgattctactcgagcgtgctttcgttgctcgagagattaccttgttaaatccggtttggatccattccaagaatactggtaaaccgttttacgccattcttcataggattgatgttggtgttgttattgatttagagccagctagaactgaagatcctgcgctttctattgctggtgctgttcaatcgcagaaactcgcggttcgtgcgatttctcagttacaggctcttcctggtggagatattaagcttttgtgtgacactgtcgtggaaagtgtgagggacttgactggttatgatcgtgttatggtttataagtttcatgaagatgagcatggagaagttgtagctgagagtaaacgagatgatttagagccttatattggactgcatgttcctgctactgatattcctcaagcgtcaaggttcttgtttaagcagaaccgtgtccgaatgatagtagattgcaatgccacacctgttcttgtggtccaggacgataggctaactcagtctatgtgcttggttggttctactcttagggctcctcatggttgtcactctcagtatatggctaacatgggatctattgcgtctttagcaatggcggttataatcaatggaaatgaagatgatgggagcaatgtagctagtggaagaagctcgatgaggctttggggtttggttgtttgccatcacacttcttctcgctgcataccgtttccgctaaggtatgcttgtgagtttttgatgcaggctttcggtttacagttaaacatggaattgcagttagctttgcaaatgtcagagaaacgcgttttgagaacgcagacactgttatgtgatatgcttctgcgtgactcgcctgctggaattgttacacagagtcccagtatcatggacttagtgaaatgtgacggtgcagcatttctttaccacgggaagtattacccgttgggtgttgctcctagtgaagttcagataaaagatgttgtggagtggttgcttgcgaatcatgcggattcaaccggattaagcactgatagtttaggcgatgcggggtatcccggtgcagctgcgttaggggatgctgtgtgcggtatggcagttgcatatatcacaaaaagagactttcttttttggtttcgatctcacactgcgaaagaaatcaaatggggaggcgctaagcatcatccggaggataaagatgatgggcaacgaatgcatcctcgttcgtcctttcaggcttttcttgaagttgttaagagccggagtcagccatgggaaactgcggaaatggatgcgattcactcgctccagcttattctgagagactcttttaaagaatctgaggcggctatgaactctaaagttgtggatggtgtggttcagccatgtagggatatggcgggggaacaggggattgatgagttaggtgcagttgcaagagagatggttaggctcattgagactgcaactgttcctatattcgctgtggatgccggaggctgcatcaatggatggaacgctaagattgcagagttgacaggtctctcagttgaagaagctatggggaagtctctggtttctgatttaatatacaaagagaatgaagcaactgtcaataagcttctttctcgtgctttgagaggggacgaggaaaagaatgtggaggttaagctgaaaactttcagccccgaactacaagggaaagcagtttttgtggttgtgaatgcttgttccagcaaggactacttgaacaacattgtcggcgtttgttttgttggacaagacgttactagtcagaaaatcgtaatggataagttcatcaacatacaaggagattacaaggctattgtacatagcccaaaccctctaatcccgccaatttttgctgctgacgagaacacgtgctgcctggaatggaacatggcgatggaaaagcttacgggttggtctcgcagtgaagtgattgggaaaatgattgtcggggaagtgtttgggagctgttgcatgctaaagggtcctgatgctttaaccaagttcatgattgtattgcataatgcgattggtggccaagatacggataagttccctttcccattctttgaccgcaatgggaagtttgttcaggctctattgactgcaaacaagcgggttagcctcgagggaaaggttattggggctttctgtttcttgcaaatcccgagccctgagctgcagcaagctttagcagtccaacggaggcaggacacagagtgtttcacgaaggcaaaagagttggcttatatttgtcaggtgataaagaatcctttgagcggtatgcgtttcgcaaactcattgttggaggccacagacttgaacgaggaccagaagcagttacttgaaacaagtgtttcttgcgagaaacagatctcaaggatcgtcggggacatggatcttgaaagcattgaagacggttcatttgtgctaaagagggaagagtttttccttggaagtgtcataaacgcgattgtaagtcaagcgatgttcttattaagggacagaggtcttcagctgatccgtgacattcccgaagagatcaaatcaatagaggtttttggagaccagataaggattcaacagctcctggctgagtttctgctgagtataatccggtatgcaccatctcaagagtgggtggagatccatttaagccaactttcaaagcaaatggctgatggattcgccgccatccgcacagaattcagaatggcgtgtccaggtgaaggtctgcctccagagctagtccgagacatgttccatagcagcaggtggacaagccctgaaggtttaggtctaagcgtatgtcgaaagattttaaagctaatgaacggtgaggttcaatacatccgagaatcagaacggtcctatttcctcatcattctggaactccctgtacctcgaaagcgaccattgtcaactgctagtggaagtggtgacatgatgctgatgatgccatattagatggtttccggagtcgggggtagtggcggtggccgtggcggtggccgtggcggagaagaagaaccgtcgtcaagtcacactcctaataaccgaagaggaggagaacaagctcaatcgtcgggaacgaaatctctcagaccaagaagcaacactgaatcaatgagcaaagcaattcaacagtacaccgtcgacgcaagactccacgccgttttcgaacaatccggcgaatcagggaaatcattcgactactcacaatcactcaaaacgacgacgtacggttcctctgtacctgagcaacagatcacagcttatctctctcgaatccagcgaggtggttacattcagcctttcggatgtatgatcgccgtcgatgaatccagtttccggatcatcggttacagtgaaaacgccagagaaatgttagggattatgcctcaatctgttcctactcttgagaaacctgagattctagctatgggaactgatgtgagatctttgttcacttcttcgagctcgattctactcgagcgtgctttcgttgctcgagagattaccttgttaaatccggtttggatccattccaagaatactggtaaaccgttttacgccattcttcataggattgatgttggtgttgttattgatttagagccagctagaactgaagatcctgcgctttctattgctggtgctgttcaatcgcagaaactcgcggttcgtgcgatttctcagttacaggctcttcctggtggagatattaagcttttgtgtgacactgtcgtggaaagtgtgagggacttgactggttatgatcgtgttatggtttataagtttcatgaagatgagcatggagaagttgtagctgagagtaaacgagatgatttagagccttatattggactgcatgttcctgctactgatattcctcaagcgtcaaggttcttgtttaagcagaaccgtgtccgaatgatagtagattgcaatgccacacctgttcttgtggtccaggacgataggctaactcagtctatgtgcttggttggttctactcttagggctcctcatggttgtcactctcagtatatggctaacatgggatctattgcgtctttagcaatggcggttataatcaatggaaatgaagatgatgggagcaatgtagctagtggaagaagctcgatgaggctttggggtttggttgtttgccatcacacttcttctcgctgcataccgtttccgctaaggtatgcttgtgagtttttgatgcaggctttcggtttacagttaaacatggaattgcagttagctttgcaaatgtcagagaaacgcgttttgagaacgcagacactgttatgtgatatgcttctgcgtgactcgcctgctggaattgttacacagagtcccagtatcatggacttagtgaaatgtgacggtgcagcatttctttaccacgggaagtattacccgttgggtgttgctcctagtgaagttcagataaaagatgttgtggagtggttgcttgcgaatcatgcggattcaaccggattaagcactgatagtttaggcgatgcggggtatcccggtgcagctgcgttaggggatgctgtgtgcggtatggcagttgcatatatcacaaaaagagactttcttttttggtttcgatctcacactgcgaaagaaatcaaatggggaggcgctaagcatcatccggaggataaagatgatgggcaacgaatgcatcctcgttcgtcctttcaggcttttcttgaagttgttaagagccggagtcagccatgggaaactgcggaaatggatgcgattcactcgctccagcttattctgagagactcttttaaagaatctgaggcggctatgaactctaaagttgtggatggtgtggttcagccatgtagggatatggcgggggaacaggggattgatgagttaggtgcagttgcaagagagatggttaggctcattgagactgcaactgttcctatattcgctgtggatgccggaggctgcatcaatggatggaacgctaagattgcagagttgacaggtctctcagttgaagaagctatggggaagtctctggtttctgatttaatatacaaagagaatgaagcaactgtcaataagcttctttctcgtgctttgagaggggacgaggaaaagaatgtggaggttaagctgaaaactttcagccccgaactacaagggaaagcagtttttgtggttgtgaatgcttgttccagcaaggactacttgaacaacattgtcggcgtttgttttgttggacaagacgttactagtcagaaaatcgtaatggataagttcatcaacatacaaggagattacaaggctattgtacatagcccaaaccctctaatcccgccaatttttgctgctgacgagaacacgtgctgcctggaatggaacatggcgatggaaaagcttacgggttggtctcgcagtgaagtgattgggaaaatgattgtcggggaagtgtttgggagctgttgcatgctaaagggtcctgatgctttaaccaagttcatgattgtattgcataatgcgattggtggccaagatacggataagttccctttcccattctttgaccgcaatgggaagtttgttcaggctctattgactgcaaacaagcgggttagcctcgagggaaaggttattggggctttctgtttcttgcaaatcccgagccctgagctgcagcaagctttagcagtccaacggaggcaggacacagagtgtttcacgaaggcaaaagagttggcttatatttgtcaggtgataaagaatcctttgagcggtatgcgtttcgcaaactcattgttggaggccacagacttgaacgaggaccagaagcagttacttgaaacaagtgtttcttgcgagaaacagatctcaaggatcgtcggggacatggatcttgaaagcattgaagacggttcatttgtgctaaagagggaagagtttttccttggaagtgtcataaacgcgattgtaagtcaagcgatgttcttattaagggacagaggtcttcagctgatccgtgacattcccgaagagatcaaatcaatagaggtttttggagaccagataaggattcaacagctcctggctgagtttctgctgagtataatccggtatgcaccatctcaagagtgggtggagatccatttaagccaactttcaaagcaaatggctgatggattcgccgccatccgcacagaattcagaatggcgtgtccaggtgaaggtctgcctccagagctagtccgagacatgttccatagcagcaggtggacaagccctgaaggtttaggtctaagcgtatgtcgaaagattttaaagctaatgaacggtgaggttcaatacatccgagaatcagaacggtcctatttcctcatcattctggaactccctgtacctcgaaagcgaccattgtcaactgctagtggaagtggtgacatgatgctgatgatgccatattagatggtttccggagtcgggggtagtggcggtggccgtggcggtggccgtggcggagaagaagaaccgtcgtcaagtcacactcctaataaccgaagaggaggagaacaagctcaatcgtcgggaacgaaatctctcagaccaagaagcaacactgaatcaatgagcaaagcaattcaacagtacaccgtcgacgcaagactccacgccgttttcgaacaatccggcgaatcagggaaatcattcgactactcacaatcactcaaaacgacgacgtacggttcctctgtacctgagcaacagatcacagcttatctctctcgaatccagcgaggtggttacattcagcctttcggatgtatgatcgccgtcgatgaatccagtttccggatcatcggttacagtgaaaacgccagagaaatgttagggattatgcctcaatctgttcctactcttgagaaacctgagattctagctatgggaactgatgtgagatctttgttcacttcttcgagctcgattctactcgagcgtgctttcgttgctcgagagattaccttgttaaatccggtttggatccattccaagaatactggtaaaccgttttacgccattcttcataggattgatgttggtgttgttattgatttagagccagctagaactgaagatcctgcgctttctattgctggtgctgttcaatcgcagaaactcgcggttcgtgcgatttctcagttacaggctcttcctggtggagatattaagcttttgtgtgacactgtcgtggaaagtgtgagggacttgactggttatgatcgtgttatggtttataagtttcatgaagatgagcatggagaagttgtagctgagagtaaacgagatgatttagagccttatattggactgcatgttcctgctactgatattcctcaagcgtcaaggttcttgtttaagcagaaccgtgtccgaatgatagtagattgcaatgccacacctgttcttgtggtccaggacgataggctaactcagtctatgtgcttggttggttctactcttagggctcctcatggttgtcactctcagtatatggctaacatgggatctattgcgtctttagcaatggcggttataatcaatggaaatgaagatgatgggagcaatgtagctagtggaagaagctcgatgaggctttggggtttggttgtttgccatcacacttcttctcgctgcataccgtttccgctaaggtatgcttgtgagtttttgatgcaggctttcggtttacagttaaacatggaattgcagttagctttgcaaatgtcagagaaacgcgttttgagaacgcagacactgttatgtgatatgcttctgcgtgactcgcctgctggaattgttacacagagtcccagtatcatggacttagtgaaatgtgacggtgcagcatttctttaccacgggaagtattacccgttgggtgttgctcctagtgaagttcagataaaagatgttgtggagtggttgcttgcgaatcatgcggattcaaccggattaagcactgatagtttaggcgatgcggggtatcccggtgcagctgcgttaggggatgctgtgtgcggtatggcagttgcatatatcacaaaaagagactttcttttttggtttcgatctcacactgcgaaagaaatcaaatggggaggcgctaagcatcatccggaggataaagatgatgggcaacgaatgcatcctcgttcgtcctttcaggcttttcttgaagttgttaagagccggagtcagccatgggaaactgcggaaatggatgcgattcactcgctccagcttattctgagagactcttttaaagaatctgaggcggctatgaactctaaagttgtggatggtgtggttcagccatgtagggatatggcgggggaacaggggattgatgagttaggtgcagttgcaagagagatggttaggctcattgagactgcaactgttcctatattcgctgtggatgccggaggctgcatcaatggatggaacgctaagattgcagagttgacaggtctctcagttgaagaagctatggggaagtctctggtttctgatttaatatacaaagagaatgaagcaactgtcaataagcttctttctcgtgctttgagaggggacgaggaaaagaatgtggaggttaagctgaaaactttcagccccgaactacaagggaaagcagtttttgtggttgtgaatgcttgttccagcaaggactacttgaacaacattgtcggcgtttgttttgttggacaagacgttactagtcagaaaatcgtaatggataagttcatcaacatacaaggagattacaaggctattgtacatagcccaaaccctctaatcccgccaatttttgctgctgacgagaacacgtgctgcctggaatggaacatggcgatggaaaagcttacgggttggtctcgcagtgaagtgattgggaaaatgattgtcggggaagtgtttgggagctgttgcatgctaaagggtcctgatgctttaaccaagttcatgattgtattgcataatgcgattggtggccaagatacggataagttccctttcccattctttgaccgcaatgggaagtttgttcaggctctattgactgcaaacaagcgggttagcctcgagggaaaggttattggggctttctgtttcttgcaaatcccgagccctgagctgcagcaagctttagcagtccaacggaggcaggacacagagtgtttcacgaaggcaaaagagttggcttatatttgtcaggtgataaagaatcctttgagcggtatgcgtttcgcaaactcattgttggaggccacagacttgaacgaggaccagaagcagttacttgaaacaagtgtttcttgcgagaaacagatctcaaggatcgtcggggacatggatcttgaaagcattgaagacggttcatttgtgctaaagagggaagagtttttccttggaagtgtcataaacgcgattgtaagtcaagcgatgttcttattaagggacagaggtcttcagctgatccgtgacattcccgaagagatcaaatcaatagaggtttttggagaccagataaggattcaacagctcctggctgagtttctgctgagtataatccggtatgcaccatctcaagagtgggtggagatccatttaagccaactttcaaagcaaatggctgatggattcgccgccatccgcacagaattcagaatggcgtgtccaggtgaaggtctgcctccagagctagtccgagacatgttccatagcagcaggtggacaagccctgaaggtttaggtctaagcgtatgtcgaaagattttaaagctaatgaacggtgaggttcaatacatccgagaatcagaacggtcctatttcctcatcattctggaactccctgtacctcgaaagcgaccattgtcaactgctagtggaagtggtgacatgatgctgatgatgccatattagatggtttccggagtcgggggtagtggcggtggccgtggcggtggccgtggcggagaagaagaaccgtcgtcaagtcacactcctaataaccgaagaggaggagaacaagctcaatcgtcgggaacgaaatctctcagaccaagaagcaacactgaatcaatgagcaaagcaattcaacagtacaccgtcgacgcaagactccacgccgttttcgaacaatccggcgaatcagggaaatcattcgactactcacaatcactcaaaacgacgacgtacggttcctctgtacctgagcaacagatcacagcttatctctctcgaatccagcgaggtggttacattcagcctttcggatgtatgatcgccgtcgatgaatccagtttccggatcatcggttacagtgaaaacgccagagaaatgttagggattatgcctcaatctgttcctactcttgagaaacctgagattctagctatgggaactgatgtgagatctttgttcacttcttcgagctcgattctactcgagcgtgctttcgttgctcgagagattaccttgttaaatccggtttggatccattccaagaatactggtaaaccgttttacgccattcttcataggattgatgttggtgttgttattgatttagagccagctagaactgaagatcctgcgctttctattgctggtgctgttcaatcgcagaaactcgcggttcgtgcgatttctcagttacaggctcttcctggtggagatattaagcttttgtgtgacactgtcgtggaaagtgtgagggacttgactggttatgatcgtgttatggtttataagtttcatgaagatgagcatggagaagttgtagctgagagtaaacgagatgatttagagccttatattggactgcatgttcctgctactgatattcctcaagcgtcaaggttcttgtttaagcagaaccgtgtccgaatgatagtagattgcaatgccacacctgttcttgtggtccaggacgataggctaactcagtctatgtgcttggttggttctactcttagggctcctcatggttgtcactctcagtatatggctaacatgggatctattgcgtctttagcaatggcggttataatcaatggaaatgaagatgatgggagcaatgtagctagtggaagaagctcgatgaggctttggggtttggttgtttgccatcacacttcttctcgctgcataccgtttccgctaaggtatgcttgtgagtttttgatgcaggctttcggtttacagttaaacatggaattgcagttagctttgcaaatgtcagagaaacgcgttttgagaacgcagacactgttatgtgatatgcttctgcgtgactcgcctgctggaattgttacacagagtcccagtatcatggacttagtgaaatgtgacggtgcagcatttctttaccacgggaagtattacccgttgggtgttgctcctagtgaagttcagataaaagatgttgtggagtggttgcttgcgaatcatgcggattcaaccggattaagcactgatagtttaggcgatgcggggtatcccggtgcagctgcgttaggggatgctgtgtgcggtatggcagttgcatatatcacaaaaagagactttcttttttggtttcgatctcacactgcgaaagaaatcaaatggggaggcgctaagcatcatccggaggataaagatgatgggcaacgaatgcatcctcgttcgtcctttcaggcttttcttgaagttgttaagagccggagtcagccatgggaaactgcggaaatggatgcgattcactcgctccagcttattctgagagactcttttaaagaatctgaggcggctatgaactctaaagttgtggatggtgtggttcagccatgtagggatatggcgggggaacaggggattgatgagttaggtgcagttgcaagagagatggttaggctcattgagactgcaactgttcctatattcgctgtggatgccggaggctgcatcaatggatggaacgctaagattgcagagttgacaggtctctcagttgaagaagctatggggaagtctctggtttctgatttaatatacaaagagaatgaagcaactgtcaataagcttctttctcgtgctttgagaggggacgaggaaaagaatgtggaggttaagctgaaaactttcagccccgaactacaagggaaagcagtttttgtggttgtgaatgcttgttccagcaaggactacttgaacaacattgtcggcgtttgttttgttggacaagacgttactagtcagaaaatcgtaatggataagttcatcaacatacaaggagattacaaggctattgtacatagcccaaaccctctaatcccgccaatttttgctgctgacgagaacacgtgctgcctggaatggaacatggcgatggaaaagcttacgggttggtctcgcagtgaagtgattgggaaaatgattgtcggggaagtgtttgggagctgttgcatgctaaagggtcctgatgctttaaccaagttcatgattgtattgcataatgcgattggtggccaagatacggataagttccctttcccattctttgaccgcaatgggaagtttgttcaggctctattgactgcaaacaagcgggttagcctcgagggaaaggttattggggctttctgtttcttgcaaatcccgagccctgagctgcagcaagctttagcagtccaacggaggcaggacacagagtgtttcacgaaggcaaaagagttggcttatatttgtcaggtgataaagaatcctttgagcggtatgcgtttcgcaaactcattgttggaggccacagacttgaacgaggaccagaagcagttacttgaaacaagtgtttcttgcgagaaacagatctcaaggatcgtcggggacatggatcttgaaagcattgaagacggttcatttgtgctaaagagggaagagtttttccttggaagtgtcataaacgcgattgtaagtcaagcgatgttcttattaagggacagaggtcttcagctgatccgtgacattcccgaagagatcaaatcaatagaggtttttggagaccagataaggattcaacagctcctggctgagtttctgctgagtataatccggtatgcaccatctcaagagtgggtggagatccatttaagccaactttcaaagcaaatggctgatggattcgccgccatccgcacagaattcagaatggcgtgtccaggtgaaggtctgcctccagagctagtccgagacatgttccatagcagcaggtggacaagccctgaaggtttaggtctaagcgtatgtcgaaagattttaaagctaatgaacggtgaggttcaatacatccgagaatcagaacggtcctatttcctcatcattctggaactccctgtacctcgaaagcgaccattgtcaactgctagtggaagtggtgacatgatgctgatgatgccatattagatggtttccggagtcgggggtagtggcggtggccgtggcggtggccgtggcggagaagaagaaccgtcgtcaagtcacactcctaataaccgaagaggaggagaacaagctcaatcgtcgggaacgaaatctctcagaccaagaagcaacactgaatcaatgagcaaagcaattcaacagtacaccgtcgacgcaagactccacgccgttttcgaacaatccggcgaatcagggaaatcattcgactactcacaatcactcaaaacgacgacgtacggttcctctgtacctgagcaacagatcacagcttatctctctcgaatccagcgaggtggttacattcagcctttcggatgtatgatcgccgtcgatgaatccagtttccggatcatcggttacagtgaaaacgccagagaaatgttagggattatgcctcaatctgttcctactcttgagaaacctgagattctagctatgggaactgatgtgagatctttgttcacttcttcgagctcgattctactcgagcgtgctttcgttgctcgagagattaccttgttaaatccggtttggatccattccaagaatactggtaaaccgttttacgccattcttcataggattgatgttggtgttgttattgatttagagccagctagaactgaagatcctgcgctttctattgctggtgctgttcaatcgcagaaactcgcggttcgtgcgatttctcagttacaggctcttcctggtggagatattaagcttttgtgtgacactgtcgtggaaagtgtgagggacttgactggttatgatcgtgttatggtttataagtttcatgaagatgagcatggagaagttgtagctgagagtaaacgagatgatttagagccttatattggactgcatgttcctgctactgatattcctcaagcgtcaaggttcttgtttaagcagaaccgtgtccgaatgatagtagattgcaatgccacacctgttcttgtggtccaggacgataggctaactcagtctatgtgcttggttggttctactcttagggctcctcatggttgtcactctcagtatatggctaacatgggatctattgcgtctttagcaatggcggttataatcaatggaaatgaagatgatgggagcaatgtagctagtggaagaagctcgatgaggctttggggtttggttgtttgccatcacacttcttctcgctgcataccgtttccgctaaggtatgcttgtgagtttttgatgcaggctttcggtttacagttaaacatggaattgcagttagctttgcaaatgtcagagaaacgcgttttgagaacgcagacactgttatgtgatatgcttctgcgtgactcgcctgctggaattgttacacagagtcccagtatcatggacttagtgaaatgtgacggtgcagcatttctttaccacgggaagtattacccgttgggtgttgctcctagtgaagttcagataaaagatgttgtggagtggttgcttgcgaatcatgcggattcaaccggattaagcactgatagtttaggcgatgcggggtatcccggtgcagctgcgttaggggatgctgtgtgcggtatggcagttgcatatatcacaaaaagagactttcttttttggtttcgatctcacactgcgaaagaaatcaaatggggaggcgctaagcatcatccggaggataaagatgatgggcaacgaatgcatcctcgttcgtcctttcaggcttttcttgaagttgttaagagccggagtcagccatgggaaactgcggaaatggatgcgattcactcgctccagcttattctgagagactcttttaaagaatctgaggcggctatgaactctaaagttgtggatggtgtggttcagccatgtagggatatggcgggggaacaggggattgatgagttaggtgcagttgcaagagagatggttaggctcattgagactgcaactgttcctatattcgctgtggatgccggaggctgcatcaatggatggaacgctaagattgcagagttgacaggtctctcagttgaagaagctatggggaagtctctggtttctgatttaatatacaaagagaatgaagcaactgtcaataagcttctttctcgtgctttgagaggggacgaggaaaagaatgtggaggttaagctgaaaactttcagccccgaactacaagggaaagcagtttttgtggttgtgaatgcttgttccagcaaggactacttgaacaacattgtcggcgtttgttttgttggacaagacgttactagtcagaaaatcgtaatggataagttcatcaacatacaaggagattacaaggctattgtacatagcccaaaccctctaatcccgccaatttttgctgctgacgagaacacgtgctgcctggaatggaacatggcgatggaaaagcttacgggttggtctcgcagtgaagtgattgggaaaatgattgtcggggaagtgtttgggagctgttgcatgctaaagggtcctgatgctttaaccaagttcatgattgtattgcataatgcgattggtggccaagatacggataagttccctttcccattctttgaccgcaatgggaagtttgttcaggctctattgactgcaaacaagcgggttagcctcgagggaaaggttattggggctttctgtttcttgcaaatcccgagccctgagctgcagcaagctttagcagtccaacggaggcaggacacagagtgtttcacgaaggcaaaagagttggcttatatttgtcaggtgataaagaatcctttgagcggtatgcgtttcgcaaactcattgttggaggccacagacttgaacgaggaccagaagcagttacttgaaacaagtgtttcttgcgagaaacagatctcaaggatcgtcggggacatggatcttgaaagcattgaagacggttcatttgtgctaaagagggaagagtttttccttggaagtgtcataaacgcgattgtaagtcaagcgatgttcttattaagggacagaggtcttcagctgatccgtgacattcccgaagagatcaaatcaatagaggtttttggagaccagataaggattcaacagctcctggctgagtttctgctgagtataatccggtatgcaccatctcaagagtgggtggagatccatttaagccaactttcaaagcaaatggctgatggattcgccgccatccgcacagaattcagaatggcgtgtccaggtgaaggtctgcctccagagctagtccgagacatgttccatagcagcaggtggacaagccctgaaggtttaggtctaagcgtatgtcgaaagattttaaagctaatgaacggtgaggttcaatacatccgagaatcagaacggtcctatttcctcatcattctggaactccctgtacctcgaaagcgaccattgtcaactgctagtggaagtggtgacatgatgctgatgatgccatattagatggtttccggagtcgggggtagtggcggtggccgtggcggtggccgtggcggagaagaagaaccgtcgtcaagtcacactcctaataaccgaagaggaggagaacaagctcaatcgtcgggaacgaaatctctcagaccaagaagcaacactgaatcaatgagcaaagcaattcaacagtacaccgtcgacgcaagactccacgccgttttcgaacaatccggcgaatcagggaaatcattcgactactcacaatcactcaaaacgacgacgtacggttcctctgtacctgagcaacagatcacagcttatctctctcgaatccagcgaggtggttacattcagcctttcggatgtatgatcgccgtcgatgaatccagtttccggatcatcggttacagtgaaaacgccagagaaatgttagggattatgcctcaatctgttcctactcttgagaaacctgagattctagctatgggaactgatgtgagatctttgttcacttcttcgagctcgattctactcgagcgtgctttcgttgctcgagagattaccttgttaaatccggtttggatccattccaagaatactggtaaaccgttttacgccattcttcataggattgatgttggtgttgttattgatttagagccagctagaactgaagatcctgcgctttctattgctggtgctgttcaatcgcagaaactcgcggttcgtgcgatttctcagttacaggctcttcctggtggagatattaagcttttgtgtgacactgtcgtggaaagtgtgagggacttgactggttatgatcgtgttatggtttataagtttcatgaagatgagcatggagaagttgtagctgagagtaaacgagatgatttagagccttatattggactgcatgttcctgctactgatattcctcaagcgtcaaggttcttgtttaagcagaaccgtgtccgaatgatagtagattgcaatgccacacctgttcttgtggtccaggacgataggctaactcagtctatgtgcttggttggttctactcttagggctcctcatggttgtcactctcagtatatggctaacatgggatctattgcgtctttagcaatggcggttataatcaatggaaatgaagatgatgggagcaatgtagctagtggaagaagctcgatgaggctttggggtttggttgtttgccatcacacttcttctcgctgcataccgtttccgctaaggtatgcttgtgagtttttgatgcaggctttcggtttacagttaaacatggaattgcagttagctttgcaaatgtcagagaaacgcgttttgagaacgcagacactgttatgtgatatgcttctgcgtgactcgcctgctggaattgttacacagagtcccagtatcatggacttagtgaaatgtgacggtgcagcatttctttaccacgggaagtattacccgttgggtgttgctcctagtgaagttcagataaaagatgttgtggagtggttgcttgcgaatcatgcggattcaaccggattaagcactgatagtttaggcgatgcggggtatcccggtgcagctgcgttaggggatgctgtgtgcggtatggcagttgcatatatcacaaaaagagactttcttttttggtttcgatctcacactgcgaaagaaatcaaatggggaggcgctaagcatcatccggaggataaagatgatgggcaacgaatgcatcctcgttcgtcctttcaggcttttcttgaagttgttaagagccggagtcagccatgggaaactgcggaaatggatgcgattcactcgctccagcttattctgagagactcttttaaagaatctgaggcggctatgaactctaaagttgtggatggtgtggttcagccatgtagggatatggcgggggaacaggggattgatgagttaggtgcagttgcaagagagatggttaggctcattgagactgcaactgttcctatattcgctgtggatgccggaggctgcatcaatggatggaacgctaagattgcagagttgacaggtctctcagttgaagaagctatggggaagtctctggtttctgatttaatatacaaagagaatgaagcaactgtcaataagcttctttctcgtgctttgagaggggacgaggaaaagaatgtggaggttaagctgaaaactttcagccccgaactacaagggaaagcagtttttgtggttgtgaatgcttgttccagcaaggactacttgaacaacattgtcggcgtttgttttgttggacaagacgttactagtcagaaaatcgtaatggataagttcatcaacatacaaggagattacaaggctattgtacatagcccaaaccctctaatcccgccaatttttgctgctgacgagaacacgtgctgcctggaatggaacatggcgatggaaaagcttacgggttggtctcgcagtgaagtgattgggaaaatgattgtcggggaagtgtttgggagctgttgcatgctaaagggtcctgatgctttaaccaagttcatgattgtattgcataatgcgattggtggccaagatacggataagttccctttcccattctttgaccgcaatgggaagtttgttcaggctctattgactgcaaacaagcgggttagcctcgagggaaaggttattggggctttctgtttcttgcaaatcccgagccctgagctgcagcaagctttagcagtccaacggaggcaggacacagagtgtttcacgaaggcaaaagagttggcttatatttgtcaggtgataaagaatcctttgagcggtatgcgtttcgcaaactcattgttggaggccacagacttgaacgaggaccagaagcagttacttgaaacaagtgtttcttgcgagaaacagatctcaaggatcgtcggggacatggatcttgaaagcattgaagacggttcatttgtgctaaagagggaagagtttttccttggaagtgtcataaacgcgattgtaagtcaagcgatgttcttattaagggacagaggtcttcagctgatccgtgacattcccgaagagatcaaatcaatagaggtttttggagaccagataaggattcaacagctcctggctgagtttctgctgagtataatccggtatgcaccatctcaagagtgggtggagatccatttaagccaactttcaaagcaaatggctgatggattcgccgccatccgcacagaattcagaatggcgtgtccaggtgaaggtctgcctccagagctagtccgagacatgttccatagcagcaggtggacaagccctgaaggtttaggtctaagcgtatgtcgaaagattttaaagctaatgaacggtgaggttcaatacatccgagaatcagaacggtcctatttcctcatcattctggaactccctgtacctcgaaagcgaccattgtcaactgctagtggaagtggtgacatgatgctgatgatgccatattagatggtttccggagtcgggggtagtggcggtggccgtggcggtggccgtggcggagaagaagaaccgtcgtcaagtcacactcctaataaccgaagaggaggagaacaagctcaatcgtcgggaacgaaatctctcagaccaagaagcaacactgaatcaatgagcaaagcaattcaacagtacaccgtcgacgcaagactccacgccgttttcgaacaatccggcgaatcagggaaatcattcgactactcacaatcactcaaaacgacgacgtacggttcctctgtacctgagcaacagatcacagcttatctctctcgaatccagcgaggtggttacattcagcctttcggatgtatgatcgccgtcgatgaatccagtttccggatcatcggttacagtgaaaacgccagagaaatgttagggattatgcctcaatctgttcctactcttgagaaacctgagattctagctatgggaactgatgtgagatctttgttcacttcttcgagctcgattctactcgagcgtgctttcgttgctcgagagattaccttgttaaatccggtttggatccattccaagaatactggtaaaccgttttacgccattcttcataggattgatgttggtgttgttattgatttagagccagctagaactgaagatcctgcgctttctattgctggtgctgttcaatcgcagaaactcgcggttcgtgcgatttctcagttacaggctcttcctggtggagatattaagcttttgtgtgacactgtcgtggaaagtgtgagggacttgactggttatgatcgtgttatggtttataagtttcatgaagatgagcatggagaagttgtagctgagagtaaacgagatgatttagagccttatattggactgcatgttcctgctactgatattcctcaagcgtcaaggttcttgtttaagcagaaccgtgtccgaatgatagtagattgcaatgccacacctgttcttgtggtccaggacgataggctaactcagtctatgtgcttggttggttctactcttagggctcctcatggttgtcactctcagtatatggctaacatgggatctattgcgtctttagcaatggcggttataatcaatggaaatgaagatgatgggagcaatgtagctagtggaagaagctcgatgaggctttggggtttggttgtttgccatcacacttcttctcgctgcataccgtttccgctaaggtatgcttgtgagtttttgatgcaggctttcggtttacagttaaacatggaattgcagttagctttgcaaatgtcagagaaacgcgttttgagaacgcagacactgttatgtgatatgcttctgcgtgactcgcctgctggaattgttacacagagtcccagtatcatggacttagtgaaatgtgacggtgcagcatttctttaccacgggaagtattacccgttgggtgttgctcctagtgaagttcagataaaagatgttgtggagtggttgcttgcgaatcatgcggattcaaccggattaagcactgatagtttaggcgatgcggggtatcccggtgcagctgcgttaggggatgctgtgtgcggtatggcagttgcatatatcacaaaaagagactttcttttttggtttcgatctcacactgcgaaagaaatcaaatggggaggcgctaagcatcatccggaggataaagatgatgggcaacgaatgcatcctcgttcgtcctttcaggcttttcttgaagttgttaagagccggagtcagccatgggaaactgcggaaatggatgcgattcactcgctccagcttattctgagagactcttttaaagaatctgaggcggctatgaactctaaagttgtggatggtgtggttcagccatgtagggatatggcgggggaacaggggattgatgagttaggtgcagttgcaagagagatggttaggctcattgagactgcaactgttcctatattcgctgtggatgccggaggctgcatcaatggatggaacgctaagattgcagagttgacaggtctctcagttgaagaagctatggggaagtctctggtttctgatttaatatacaaagagaatgaagcaactgtcaataagcttctttctcgtgctttgagaggggacgaggaaaagaatgtggaggttaagctgaaaactttcagccccgaactacaagggaaagcagtttttgtggttgtgaatgcttgttccagcaaggactacttgaacaacattgtcggcgtttgttttgttggacaagacgttactagtcagaaaatcgtaatggataagttcatcaacatacaaggagattacaaggctattgtacatagcccaaaccctctaatcccgccaatttttgctgctgacgagaacacgtgctgcctggaatggaacatggcgatggaaaagcttacgggttggtctcgcagtgaagtgattgggaaaatgattgtcggggaagtgtttgggagctgttgcatgctaaagggtcctgatgctttaaccaagttcatgattgtattgcataatgcgattggtggccaagatacggataagttccctttcccattctttgaccgcaatgggaagtttgttcaggctctattgactgcaaacaagcgggttagcctcgagggaaaggttattggggctttctgtttcttgcaaatcccgagccctgagctgcagcaagctttagcagtccaacggaggcaggacacagagtgtttcacgaaggcaaaagagttggcttatatttgtcaggtgataaagaatcctttgagcggtatgcgtttcgcaaactcattgttggaggccacagacttgaacgaggaccagaagcagttacttgaaacaagtgtttcttgcgagaaacagatctcaaggatcgtcggggacatggatcttgaaagcattgaagacggttcatttgtgctaaagagggaagagtttttccttggaagtgtcataaacgcgattgtaagtcaagcgatgttcttattaagggacagaggtcttcagctgatccgtgacattcccgaagagatcaaatcaatagaggtttttggagaccagataaggattcaacagctcctggctgagtttctgctgagtataatccggtatgcaccatctcaagagtgggtggagatccatttaagccaactttcaaagcaaatggctgatggattcgccgccatccgcacagaattcagaatggcgtgtccaggtgaaggtctgcctccagagctagtccgagacatgttccatagcagcaggtggacaagccctgaaggtttaggtctaagcgtatgtcgaaagattttaaagctaatgaacggtgaggttcaatacatccgagaatcagaacggtcctatttcctcatcattctggaactccctgtacctcgaaagcgaccattgtcaactgctagtggaagtggtgacatgatgctgatgatgccatattagatggtttccggagtcgggggtagtggcggtggccgtggcggtggccgtggcggagaagaagaaccgtcgtcaagtcacactcctaataaccgaagaggaggagaacaagctcaatcgtcgggaacgaaatctctcagaccaagaagcaacactgaatcaatgagcaaagcaattcaacagtacaccgtcgacgcaagactccacgccgttttcgaacaatccggcgaatcagggaaatcattcgactactcacaatcactcaaaacgacgacgtacggttcctctgtacctgagcaacagatcacagcttatctctctcgaatccagcgaggtggttacattcagcctttcggatgtatgatcgccgtcgatgaatccagtttccggatcatcggttacagtgaaaacgccagagaaatgttagggattatgcctcaatctgttcctactcttgagaaacctgagattctagctatgggaactgatgtgagatctttgttcacttcttcgagctcgattctactcgagcgtgctttcgttgctcgagagattaccttgttaaatccggtttggatccattccaagaatactggtaaaccgttttacgccattcttcataggattgatgttggtgttgttattgatttagagccagctagaactgaagatcctgcgctttctattgctggtgctgttcaatcgcagaaactcgcggttcgtgcgatttctcagttacaggctcttcctggtggagatattaagcttttgtgtgacactgtcgtggaaagtgtgagggacttgactggttatgatcgtgttatggtttataagtttcatgaagatgagcatggagaagttgtagctgagagtaaacgagatgatttagagccttatattggactgcatgttcctgctactgatattcctcaagcgtcaaggttcttgtttaagcagaaccgtgtccgaatgatagtagattgcaatgccacacctgttcttgtggtccaggacgataggctaactcagtctatgtgcttggttggttctactcttagggctcctcatggttgtcactctcagtatatggctaacatgggatctattgcgtctttagcaatggcggttataatcaatggaaatgaagatgatgggagcaatgtagctagtggaagaagctcgatgaggctttggggtttggttgtttgccatcacacttcttctcgctgcataccgtttccgctaaggtatgcttgtgagtttttgatgcaggctttcggtttacagttaaacatggaattgcagttagctttgcaaatgtcagagaaacgcgttttgagaacgcagacactgttatgtgatatgcttctgcgtgactcgcctgctggaattgttacacagagtcccagtatcatggacttagtgaaatgtgacggtgcagcatttctttaccacgggaagtattacccgttgggtgttgctcctagtgaagttcagataaaagatgttgtggagtggttgcttgcgaatcatgcggattcaaccggattaagcactgatagtttaggcgatgcggggtatcccggtgcagctgcgttaggggatgctgtgtgcggtatggcagttgcatatatcacaaaaagagactttcttttttggtttcgatctcacactgcgaaagaaatcaaatggggaggcgctaagcatcatccggaggataaagatgatgggcaacgaatgcatcctcgttcgtcctttcaggcttttcttgaagttgttaagagccggagtcagccatgggaaactgcggaaatggatgcgattcactcgctccagcttattctgagagactcttttaaagaatctgaggcggctatgaactctaaagttgtggatggtgtggttcagccatgtagggatatggcgggggaacaggggattgatgagttaggtgcagttgcaagagagatggttaggctcattgagactgcaactgttcctatattcgctgtggatgccggaggctgcatcaatggatggaacgctaagattgcagagttgacaggtctctcagttgaagaagctatggggaagtctctggtttctgatttaatatacaaagagaatgaagcaactgtcaataagcttctttctcgtgctttgagaggggacgaggaaaagaatgtggaggttaagctgaaaactttcagccccgaactacaagggaaagcagtttttgtggttgtgaatgcttgttccagcaaggactacttgaacaacattgtcggcgtttgttttgttggacaagacgttactagtcagaaaatcgtaatggataagttcatcaacatacaaggagattacaaggctattgtacatagcccaaaccctctaatcccgccaatttttgctgctgacgagaacacgtgctgcctggaatggaacatggcgatggaaaagcttacgggttggtctcgcagtgaagtgattgggaaaatgattgtcggggaagtgtttgggagctgttgcatgctaaagggtcctgatgctttaaccaagttcatgattgtattgcataatgcgattggtggccaagatacggataagttccctttcccattctttgaccgcaatgggaagtttgttcaggctctattgactgcaaacaagcgggttagcctcgagggaaaggttattggggctttctgtttcttgcaaatcccgagccctgagctgcagcaagctttagcagtccaacggaggcaggacacagagtgtttcacgaaggcaaaagagttggcttatatttgtcaggtgataaagaatcctttgagcggtatgcgtttcgcaaactcattgttggaggccacagacttgaacgaggaccagaagcagttacttgaaacaagtgtttcttgcgagaaacagatctcaaggatcgtcggggacatggatcttgaaagcattgaagacggttcatttgtgctaaagagggaagagtttttccttggaagtgtcataaacgcgattgtaagtcaagcgatgttcttattaagggacagaggtcttcagctgatccgtgacattcccgaagagatcaaatcaatagaggtttttggagaccagataaggattcaacagctcctggctgagtttctgctgagtataatccggtatgcaccatctcaagagtgggtggagatccatttaagccaactttcaaagcaaatggctgatggattcgccgccatccgcacagaattcagaatggcgtgtccaggtgaaggtctgcctccagagctagtccgagacatgttccatagcagcaggtggacaagccctgaaggtttaggtctaagcgtatgtcgaaagattttaaagctaatgaacggtgaggttcaatacatccgagaatcagaacggtcctatttcctcatcattctggaactccctgtacctcgaaagcgaccattgtcaactgctagtggaagtggtgacatgatgctgatgatgccatattagatggtttccggagtcgggggtagtggcggtggccgtggcggtggccgtggcggagaagaagaaccgtcgtcaagtcacactcctaataaccgaagaggaggagaacaagctcaatcgtcgggaacgaaatctctcagaccaagaagcaacactgaatcaatgagcaaagcaattcaacagtacaccgtcgacgcaagactccacgccgttttcgaacaatccggcgaatcagggaaatcattcgactactcacaatcactcaaaacgacgacgtacggttcctctgtacctgagcaacagatcacagcttatctctctcgaatccagcgaggtggttacattcagcctttcggatgtatgatcgccgtcgatgaatccagtttccggatcatcggttacagtgaaaacgccagagaaatgttagggattatgcctcaatctgttcctactcttgagaaacctgagattctagctatgggaactgatgtgagatctttgttcacttcttcgagctcgattctactcgagcgtgctttcgttgctcgagagattaccttgttaaatccggtttggatccattccaagaatactggtaaaccgttttacgccattcttcataggattgatgttggtgttgttattgatttagagccagctagaactgaagatcctgcgctttctattgctggtgctgttcaatcgcagaaactcgcggttcgtgcgatttctcagttacaggctcttcctggtggagatattaagcttttgtgtgacactgtcgtggaaagtgtgagggacttgactggttatgatcgtgttatggtttataagtttcatgaagatgagcatggagaagttgtagctgagagtaaacgagatgatttagagccttatattggactgcatgttcctgctactgatattcctcaagcgtcaaggttcttgtttaagcagaaccgtgtccgaatgatagtagattgcaatgccacacctgttcttgtggtccaggacgataggctaactcagtctatgtgcttggttggttctactcttagggctcctcatggttgtcactctcagtatatggctaacatgggatctattgcgtctttagcaatggcggttataatcaatggaaatgaagatgatgggagcaatgtagctagtggaagaagctcgatgaggctttggggtttggttgtttgccatcacacttcttctcgctgcataccgtttccgctaaggtatgcttgtgagtttttgatgcaggctttcggtttacagttaaacatggaattgcagttagctttgcaaatgtcagagaaacgcgttttgagaacgcagacactgttatgtgatatgcttctgcgtgactcgcctgctggaattgttacacagagtcccagtatcatggacttagtgaaatgtgacggtgcagcatttctttaccacgggaagtattacccgttgggtgttgctcctagtgaagttcagataaaagatgttgtggagtggttgcttgcgaatcatgcggattcaaccggattaagcactgatagtttaggcgatgcggggtatcccggtgcagctgcgttaggggatgctgtgtgcggtatggcagttgcatatatcacaaaaagagactttcttttttggtttcgatctcacactgcgaaagaaatcaaatggggaggcgctaagcatcatccggaggataaagatgatgggcaacgaatgcatcctcgttcgtcctttcaggcttttcttgaagttgttaagagccggagtcagccatgggaaactgcggaaatggatgcgattcactcgctccagcttattctgagagactcttttaaagaatctgaggcggctatgaactctaaagttgtggatggtgtggttcagccatgtagggatatggcgggggaacaggggattgatgagttaggtgcagttgcaagagagatggttaggctcattgagactgcaactgttcctatattcgctgtggatgccggaggctgcatcaatggatggaacgctaagattgcagagttgacaggtctctcagttgaagaagctatggggaagtctctggtttctgatttaatatacaaagagaatgaagcaactgtcaataagcttctttctcgtgctttgagaggggacgaggaaaagaatgtggaggttaagctgaaaactttcagccccgaactacaagggaaagcagtttttgtggttgtgaatgcttgttccagcaaggactacttgaacaacattgtcggcgtttgttttgttggacaagacgttactagtcagaaaatcgtaatggataagttcatcaacatacaaggagattacaaggctattgtacatagcccaaaccctctaatcccgccaatttttgctgctgacgagaacacgtgctgcctggaatggaacatggcgatggaaaagcttacgggttggtctcgcagtgaagtgattgggaaaatgattgtcggggaagtgtttgggagctgttgcatgctaaagggtcctgatgctttaaccaagttcatgattgtattgcataatgcgattggtggccaagatacggataagttccctttcccattctttgaccgcaatgggaagtttgttcaggctctattgactgcaaacaagcgggttagcctcgagggaaaggttattggggctttctgtttcttgcaaatcccgagccctgagctgcagcaagctttagcagtccaacggaggcaggacacagagtgtttcacgaaggcaaaagagttggcttatatttgtcaggtgataaagaatcctttgagcggtatgcgtttcgcaaactcattgttggaggccacagacttgaacgaggaccagaagcagttacttgaaacaagtgtttcttgcgagaaacagatctcaaggatcgtcggggacatggatcttgaaagcattgaagacggttcatttgtgctaaagagggaagagtttttccttggaagtgtcataaacgcgattgtaagtcaagcgatgttcttattaagggacagaggtcttcagctgatccgtgacattcccgaagagatcaaatcaatagaggtttttggagaccagataaggattcaacagctcctggctgagtttctgctgagtataatccggtatgcaccatctcaagagtgggtggagatccatttaagccaactttcaaagcaaatggctgatggattcgccgccatccgcacagaattcagaatggcgtgtccaggtgaaggtctgcctccagagctagtccgagacatgttccatagcagcaggtggacaagccctgaaggtttaggtctaagcgtatgtcgaaagattttaaagctaatgaacggtgaggttcaatacatccgagaatcagaacggtcctatttcctcatcattctggaactccctgtacctcgaaagcgaccattgtcaactgctagtggaagtggtgacatgatgctgatgatgccatattagatggtttccggagtcgggggtagtggcggtggccgtggcggtggccgtggcggagaagaagaaccgtcgtcaagtcacactcctaataaccgaagaggaggagaacaagctcaatcgtcgggaacgaaatctctcagaccaagaagcaacactgaatcaatgagcaaagcaattcaacagtacaccgtcgacgcaagactccacgccgttttcgaacaatccggcgaatcagggaaatcattcgactactcacaatcactcaaaacgacgacgtacggttcctctgtacctgagcaacagatcacagcttatctctctcgaatccagcgaggtggttacattcagcctttcggatgtatgatcgccgtcgatgaatccagtttccggatcatcggttacagtgaaaacgccagagaaatgttagggattatgcctcaatctgttcctactcttgagaaacctgagattctagctatgggaactgatgtgagatctttgttcacttcttcgagctcgattctactcgagcgtgctttcgttgctcgagagattaccttgttaaatccggtttggatccattccaagaatactggtaaaccgttttacgccattcttcataggattgatgttggtgttgttattgatttagagccagctagaactgaagatcctgcgctttctattgctggtgctgttcaatcgcagaaactcgcggttcgtgcgatttctcagttacaggctcttcctggtggagatattaagcttttgtgtgacactgtcgtggaaagtgtgagggacttgactggttatgatcgtgttatggtttataagtttcatgaagatgagcatggagaagttgtagctgagagtaaacgagatgatttagagccttatattggactgcatgttcctgctactgatattcctcaagcgtcaaggttcttgtttaagcagaaccgtgtccgaatgatagtagattgcaatgccacacctgttcttgtggtccaggacgataggctaactcagtctatgtgcttggttggttctactcttagggctcctcatggttgtcactctcagtatatggctaacatgggatctattgcgtctttagcaatggcggttataatcaatggaaatgaagatgatgggagcaatgtagctagtggaagaagctcgatgaggctttggggtttggttgtttgccatcacacttcttctcgctgcataccgtttccgctaaggtatgcttgtgagtttttgatgcaggctttcggtttacagttaaacatggaattgcagttagctttgcaaatgtcagagaaacgcgttttgagaacgcagacactgttatgtgatatgcttctgcgtgactcgcctgctggaattgttacacagagtcccagtatcatggacttagtgaaatgtgacggtgcagcatttctttaccacgggaagtattacccgttgggtgttgctcctagtgaagttcagataaaagatgttgtggagtggttgcttgcgaatcatgcggattcaaccggattaagcactgatagtttaggcgatgcggggtatcccggtgcagctgcgttaggggatgctgtgtgcggtatggcagttgcatatatcacaaaaagagactttcttttttggtttcgatctcacactgcgaaagaaatcaaatggggaggcgctaagcatcatccggaggataaagatgatgggcaacgaatgcatcctcgttcgtcctttcaggcttttcttgaagttgttaagagccggagtcagccatgggaaactgcggaaatggatgcgattcactcgctccagcttattctgagagactcttttaaagaatctgaggcggctatgaactctaaagttgtggatggtgtggttcagccatgtagggatatggcgggggaacaggggattgatgagttaggtgcagttgcaagagagatggttaggctcattgagactgcaactgttcctatattcgctgtggatgccggaggctgcatcaatggatggaacgctaagattgcagagttgacaggtctctcagttgaagaagctatggggaagtctctggtttctgatttaatatacaaagagaatgaagcaactgtcaataagcttctttctcgtgctttgagaggggacgaggaaaagaatgtggaggttaagctgaaaactttcagccccgaactacaagggaaagcagtttttgtggttgtgaatgcttgttccagcaaggactacttgaacaacattgtcggcgtttgttttgttggacaagacgttactagtcagaaaatcgtaatggataagttcatcaacatacaaggagattacaaggctattgtacatagcccaaaccctctaatcccgccaatttttgctgctgacgagaacacgtgctgcctggaatggaacatggcgatggaaaagcttacgggttggtctcgcagtgaagtgattgggaaaatgattgtcggggaagtgtttgggagctgttgcatgctaaagggtcctgatgctttaaccaagttcatgattgtattgcataatgcgattggtggccaagatacggataagttccctttcccattctttgaccgcaatgggaagtttgttcaggctctattgactgcaaacaagcgggttagcctcgagggaaaggttattggggctttctgtttcttgcaaatcccgagccctgagctgcagcaagctttagcagtccaacggaggcaggacacagagtgtttcacgaaggcaaaagagttggcttatatttgtcaggtgataaagaatcctttgagcggtatgcgtttcgcaaactcattgttggaggccacagacttgaacgaggaccagaagcagttacttgaaacaagtgtttcttgcgagaaacagatctcaaggatcgtcggggacatggatcttgaaagcattgaagacggttcatttgtgctaaagagggaagagtttttccttggaagtgtcataaacgcgattgtaagtcaagcgatgttcttattaagggacagaggtcttcagctgatccgtgacattcccgaagagatcaaatcaatagaggtttttggagaccagataaggattcaacagctcctggctgagtttctgctgagtataatccggtatgcaccatctcaagagtgggtggagatccatttaagccaactttcaaagcaaatggctgatggattcgccgccatccgcacagaattcagaatggcgtgtccaggtgaaggtctgcctccagagctagtccgagacatgttccatagcagcaggtggacaagccctgaaggtttaggtctaagcgtatgtcgaaagattttaaagctaatgaacggtgaggttcaatacatccgagaatcagaacggtcctatttcctcatcattctggaactccctgtacctcgaaagcgaccattgtcaactgctagtggaagtggtgacatgatgctgatgatgccatattagatggtttccggagtcgggggtagtggcggtggccgtggcggtggccgtggcggagaagaagaaccgtcgtcaagtcacactcctaataaccgaagaggaggagaacaagctcaatcgtcgggaacgaaatctctcagaccaagaagcaacactgaatcaatgagcaaagcaattcaacagtacaccgtcgacgcaagactccacgccgttttcgaacaatccggcgaatcagggaaatcattcgactactcacaatcactcaaaacgacgacgtacggttcctctgtacctgagcaacagatcacagcttatctctctcgaatccagcgaggtggttacattcagcctttcggatgtatgatcgccgtcgatgaatccagtttccggatcatcggttacagtgaaaacgccagagaaatgttagggattatgcctcaatctgttcctactcttgagaaacctgagattctagctatgggaactgatgtgagatctttgttcacttcttcgagctcgattctactcgagcgtgctttcgttgctcgagagattaccttgttaaatccggtttggatccattccaagaatactggtaaaccgttttacgccattcttcataggattgatgttggtgttgttattgatttagagccagctagaactgaagatcctgcgctttctattgctggtgctgttcaatcgcagaaactcgcggttcgtgcgatttctcagttacaggctcttcctggtggagatattaagcttttgtgtgacactgtcgtggaaagtgtgagggacttgactggttatgatcgtgttatggtttataagtttcatgaagatgagcatggagaagttgtagctgagagtaaacgagatgatttagagccttatattggactgcatgttcctgctactgatattcctcaagcgtcaaggttcttgtttaagcagaaccgtgtccgaatgatagtagattgcaatgccacacctgttcttgtggtccaggacgataggctaactcagtctatgtgcttggttggttctactcttagggctcctcatggttgtcactctcagtatatggctaacatgggatctattgcgtctttagcaatggcggttataatcaatggaaatgaagatgatgggagcaatgtagctagtggaagaagctcgatgaggctttggggtttggttgtttgccatcacacttcttctcgctgcataccgtttccgctaaggtatgcttgtgagtttttgatgcaggctttcggtttacagttaaacatggaattgcagttagctttgcaaatgtcagagaaacgcgttttgagaacgcagacactgttatgtgatatgcttctgcgtgactcgcctgctggaattgttacacagagtcccagtatcatggacttagtgaaatgtgacggtgcagcatttctttaccacgggaagtattacccgttgggtgttgctcctagtgaagttcagataaaagatgttgtggagtggttgcttgcgaatcatgcggattcaaccggattaagcactgatagtttaggcgatgcggggtatcccggtgcagctgcgttaggggatgctgtgtgcggtatggcagttgcatatatcacaaaaagagactttcttttttggtttcgatctcacactgcgaaagaaatcaaatggggaggcgctaagcatcatccggaggataaagatgatgggcaacgaatgcatcctcgttcgtcctttcaggcttttcttgaagttgttaagagccggagtcagccatgggaaactgcggaaatggatgcgattcactcgctccagcttattctgagagactcttttaaagaatctgaggcggctatgaactctaaagttgtggatggtgtggttcagccatgtagggatatggcgggggaacaggggattgatgagttaggtgcagttgcaagagagatggttaggctcattgagactgcaactgttcctatattcgctgtggatgccggaggctgcatcaatggatggaacgctaagattgcagagttgacaggtctctcagttgaagaagctatggggaagtctctggtttctgatttaatatacaaagagaatgaagcaactgtcaataagcttctttctcgtgctttgagaggggacgaggaaaagaatgtggaggttaagctgaaaactttcagccccgaactacaagggaaagcagtttttgtggttgtgaatgcttgttccagcaaggactacttgaacaacattgtcggcgtttgttttgttggacaagacgttactagtcagaaaatcgtaatggataagttcatcaacatacaaggagattacaaggctattgtacatagcccaaaccctctaatcccgccaatttttgctgctgacgagaacacgtgctgcctggaatggaacatggcgatggaaaagcttacgggttggtctcgcagtgaagtgattgggaaaatgattgtcggggaagtgtttgggagctgttgcatgctaaagggtcctgatgctttaaccaagttcatgattgtattgcataatgcgattggtggccaagatacggataagttccctttcccattctttgaccgcaatgggaagtttgttcaggctctattgactgcaaacaagcgggttagcctcgagggaaaggttattggggctttctgtttcttgcaaatcccgagccctgagctgcagcaagctttagcagtccaacggaggcaggacacagagtgtttcacgaaggcaaaagagttggcttatatttgtcaggtgataaagaatcctttgagcggtatgcgtttcgcaaactcattgttggaggccacagacttgaacgaggaccagaagcagttacttgaaacaagtgtttcttgcgagaaacagatctcaaggatcgtcggggacatggatcttgaaagcattgaagacggttcatttgtgctaaagagggaagagtttttccttggaagtgtcataaacgcgattgtaagtcaagcgatgttcttattaagggacagaggtcttcagctgatccgtgacattcccgaagagatcaaatcaatagaggtttttggagaccagataaggattcaacagctcctggctgagtttctgctgagtataatccggtatgcaccatctcaagagtgggtggagatccatttaagccaactttcaaagcaaatggctgatggattcgccgccatccgcacagaattcagaatggcgtgtccaggtgaaggtctgcctccagagctagtccgagacatgttccatagcagcaggtggacaagccctgaaggtttaggtctaagcgtatgtcgaaagattttaaagctaatgaacggtgaggttcaatacatccgagaatcagaacggtcctatttcctcatcattctggaactccctgtacctcgaaagcgaccattgtcaactgctagtggaagtggtgacatgatgctgatgatgccatattagatggtttccggagtcgggggtagtggcggtggccgtggcggtggccgtggcggagaagaagaaccgtcgtcaagtcacactcctaataaccgaagaggaggagaacaagctcaatcgtcgggaacgaaatctctcagaccaagaagcaacactgaatcaatgagcaaagcaattcaacagtacaccgtcgacgcaagactccacgccgttttcgaacaatccggcgaatcagggaaatcattcgactactcacaatcactcaaaacgacgacgtacggttcctctgtacctgagcaacagatcacagcttatctctctcgaatccagcgaggtggttacattcagcctttcggatgtatgatcgccgtcgatgaatccagtttccggatcatcggttacagtgaaaacgccagagaaatgttagggattatgcctcaatctgttcctactcttgagaaacctgagattctagctatgggaactgatgtgagatctttgttcacttcttcgagctcgattctactcgagcgtgctttcgttgctcgagagattaccttgttaaatccggtttggatccattccaagaatactggtaaaccgttttacgccattcttcataggattgatgttggtgttgttattgatttagagccagctagaactgaagatcctgcgctttctattgctggtgctgttcaatcgcagaaactcgcggttcgtgcgatttctcagttacaggctcttcctggtggagatattaagcttttgtgtgacactgtcgtggaaagtgtgagggacttgactggttatgatcgtgttatggtttataagtttcatgaagatgagcatggagaagttgtagctgagagtaaacgagatgatttagagccttatattggactgcatgttcctgctactgatattcctcaagcgtcaaggttcttgtttaagcagaaccgtgtccgaatgatagtagattgcaatgccacacctgttcttgtggtccaggacgataggctaactcagtctatgtgcttggttggttctactcttagggctcctcatggttgtcactctcagtatatggctaacatgggatctattgcgtctttagcaatggcggttataatcaatggaaatgaagatgatgggagcaatgtagctagtggaagaagctcgatgaggctttggggtttggttgtttgccatcacacttcttctcgctgcataccgtttccgctaaggtatgcttgtgagtttttgatgcaggctttcggtttacagttaaacatggaattgcagttagctttgcaaatgtcagagaaacgcgttttgagaacgcagacactgttatgtgatatgcttctgcgtgactcgcctgctggaattgttacacagagtcccagtatcatggacttagtgaaatgtgacggtgcagcatttctttaccacgggaagtattacccgttgggtgttgctcctagtgaagttcagataaaagatgttgtggagtggttgcttgcgaatcatgcggattcaaccggattaagcactgatagtttaggcgatgcggggtatcccggtgcagctgcgttaggggatgctgtgtgcggtatggcagttgcatatatcacaaaaagagactttcttttttggtttcgatctcacactgcgaaagaaatcaaatggggaggcgctaagcatcatccggaggataaagatgatgggcaacgaatgcatcctcgttcgtcctttcaggcttttcttgaagttgttaagagccggagtcagccatgggaaactgcggaaatggatgcgattcactcgctccagcttattctgagagactcttttaaagaatctgaggcggctatgaactctaaagttgtggatggtgtggttcagccatgtagggatatggcgggggaacaggggattgatgagttaggtgcagttgcaagagagatggttaggctcattgagactgcaactgttcctatattcgctgtggatgccggaggctgcatcaatggatggaacgctaagattgcagagttgacaggtctctcagttgaagaagctatggggaagtctctggtttctgatttaatatacaaagagaatgaagcaactgtcaataagcttctttctcgtgctttgagaggggacgaggaaaagaatgtggaggttaagctgaaaactttcagccccgaactacaagggaaagcagtttttgtggttgtgaatgcttgttccagcaaggactacttgaacaacattgtcggcgtttgttttgttggacaagacgttactagtcagaaaatcgtaatggataagttcatcaacatacaaggagattacaaggctattgtacatagcccaaaccctctaatcccgccaatttttgctgctgacgagaacacgtgctgcctggaatggaacatggcgatggaaaagcttacgggttggtctcgcagtgaagtgattgggaaaatgattgtcggggaagtgtttgggagctgttgcatgctaaagggtcctgatgctttaaccaagttcatgattgtattgcataatgcgattggtggccaagatacggataagttccctttcccattctttgaccgcaatgggaagtttgttcaggctctattgactgcaaacaagcgggttagcctcgagggaaaggttattggggctttctgtttcttgcaaatcccgagccctgagctgcagcaagctttagcagtccaacggaggcaggacacagagtgtttcacgaaggcaaaagagttggcttatatttgtcaggtgataaagaatcctttgagcggtatgcgtttcgcaaactcattgttggaggccacagacttgaacgaggaccagaagcagttacttgaaacaagtgtttcttgcgagaaacagatctcaaggatcgtcggggacatggatcttgaaagcattgaagacggttcatttgtgctaaagagggaagagtttttccttggaagtgtcataaacgcgattgtaagtcaagcgatgttcttattaagggacagaggtcttcagctgatccgtgacattcccgaagagatcaaatcaatagaggtttttggagaccagataaggattcaacagctcctggctgagtttctgctgagtataatccggtatgcaccatctcaagagtgggtggagatccatttaagccaactttcaaagcaaatggctgatggattcgccgccatccgcacagaattcagaatggcgtgtccaggtgaaggtctgcctccagagctagtccgagacatgttccatagcagcaggtggacaagccctgaaggtttaggtctaagcgtatgtcgaaagattttaaagctaatgaacggtgaggttcaatacatccgagaatcagaacggtcctatttcctcatcattctggaactccctgtacctcgaaagcgaccattgtcaactgctagtggaagtggtgacatgatgctgatgatgccatattagatggtttccggagtcgggggtagtggcggtggccgtggcggtggccgtggcggagaagaagaaccgtcgtcaagtcacactcctaataaccgaagaggaggagaacaagctcaatcgtcgggaacgaaatctctcagaccaagaagcaacactgaatcaatgagcaaagcaattcaacagtacaccgtcgacgcaagactccacgccgttttcgaacaatccggcgaatcagggaaatcattcgactactcacaatcactcaaaacgacgacgtacggttcctctgtacctgagcaacagatcacagcttatctctctcgaatccagcgaggtggttacattcagcctttcggatgtatgatcgccgtcgatgaatccagtttccggatcatcggttacagtgaaaacgccagagaaatgttagggattatgcctcaatctgttcctactcttgagaaacctgagattctagctatgggaactgatgtgagatctttgttcacttcttcgagctcgattctactcgagcgtgctttcgttgctcgagagattaccttgttaaatccggtttggatccattccaagaatactggtaaaccgttttacgccattcttcataggattgatgttggtgttgttattgatttagagccagctagaactgaagatcctgcgctttctattgctggtgctgttcaatcgcagaaactcgcggttcgtgcgatttctcagttacaggctcttcctggtggagatattaagcttttgtgtgacactgtcgtggaaagtgtgagggacttgactggttatgatcgtgttatggtttataagtttcatgaagatgagcatggagaagttgtagctgagagtaaacgagatgatttagagccttatattggactgcatgttcctgctactgatattcctcaagcgtcaaggttcttgtttaagcagaaccgtgtccgaatgatagtagattgcaatgccacacctgttcttgtggtccaggacgataggctaactcagtctatgtgcttggttggttctactcttagggctcctcatggttgtcactctcagtatatggctaacatgggatctattgcgtctttagcaatggcggttataatcaatggaaatgaagatgatgggagcaatgtagctagtggaagaagctcgatgaggctttggggtttggttgtttgccatcacacttcttctcgctgcataccgtttccgctaaggtatgcttgtgagtttttgatgcaggctttcggtttacagttaaacatggaattgcagttagctttgcaaatgtcagagaaacgcgttttgagaacgcagacactgttatgtgatatgcttctgcgtgactcgcctgctggaattgttacacagagtcccagtatcatggacttagtgaaatgtgacggtgcagcatttctttaccacgggaagtattacccgttgggtgttgctcctagtgaagttcagataaaagatgttgtggagtggttgcttgcgaatcatgcggattcaaccggattaagcactgatagtttaggcgatgcggggtatcccggtgcagctgcgttaggggatgctgtgtgcggtatggcagttgcatatatcacaaaaagagactttcttttttggtttcgatctcacactgcgaaagaaatcaaatggggaggcgctaagcatcatccggaggataaagatgatgggcaacgaatgcatcctcgttcgtcctttcaggcttttcttgaagttgttaagagccggagtcagccatgggaaactgcggaaatggatgcgattcactcgctccagcttattctgagagactcttttaaagaatctgaggcggctatgaactctaaagttgtggatggtgtggttcagccatgtagggatatggcgggggaacaggggattgatgagttaggtgcagttgcaagagagatggttaggctcattgagactgcaactgttcctatattcgctgtggatgccggaggctgcatcaatggatggaacgctaagattgcagagttgacaggtctctcagttgaagaagctatggggaagtctctggtttctgatttaatatacaaagagaatgaagcaactgtcaataagcttctttctcgtgctttgagaggggacgaggaaaagaatgtggaggttaagctgaaaactttcagccccgaactacaagggaaagcagtttttgtggttgtgaatgcttgttccagcaaggactacttgaacaacattgtcggcgtttgttttgttggacaagacgttactagtcagaaaatcgtaatggataagttcatcaacatacaaggagattacaaggctattgtacatagcccaaaccctctaatcccgccaatttttgctgctgacgagaacacgtgctgcctggaatggaacatggcgatggaaaagcttacgggttggtctcgcagtgaagtgattgggaaaatgattgtcggggaagtgtttgggagctgttgcatgctaaagggtcctgatgctttaaccaagttcatgattgtattgcataatgcgattggtggccaagatacggataagttccctttcccattctttgaccgcaatgggaagtttgttcaggctctattgactgcaaacaagcgggttagcctcgagggaaaggttattggggctttctgtttcttgcaaatcccgagccctgagctgcagcaagctttagcagtccaacggaggcaggacacagagtgtttcacgaaggcaaaagagttggcttatatttgtcaggtgataaagaatcctttgagcggtatgcgtttcgcaaactcattgttggaggccacagacttgaacgaggaccagaagcagttacttgaaacaagtgtttcttgcgagaaacagatctcaaggatcgtcggggacatggatcttgaaagcattgaagacggttcatttgtgctaaagagggaagagtttttccttggaagtgtcataaacgcgattgtaagtcaagcgatgttcttattaagggacagaggtcttcagctgatccgtgacattcccgaagagatcaaatcaatagaggtttttggagaccagataaggattcaacagctcctggctgagtttctgctgagtataatccggtatgcaccatctcaagagtgggtggagatccatttaagccaactttcaaagcaaatggctgatggattcgccgccatccgcacagaattcagaatggcgtgtccaggtgaaggtctgcctccagagctagtccgagacatgttccatagcagcaggtggacaagccctgaaggtttaggtctaagcgtatgtcgaaagattttaaagctaatgaacggtgaggttcaatacatccgagaatcagaacggtcctatttcctcatcattctggaactccctgtacctcgaaagcgaccattgtcaactgctagtggaagtggtgacatgatgctgatgatgccatattagatggtttccggagtcgggggtagtggcggtggccgtggcggtggccgtggcggagaagaagaaccgtcgtcaagtcacactcctaataaccgaagaggaggagaacaagctcaatcgtcgggaacgaaatctctcagaccaagaagcaacactgaatcaatgagcaaagcaattcaacagtacaccgtcgacgcaagactccacgccgttttcgaacaatccggcgaatcagggaaatcattcgactactcacaatcactcaaaacgacgacgtacggttcctctgtacctgagcaacagatcacagcttatctctctcgaatccagcgaggtggttacattcagcctttcggatgtatgatcgccgtcgatgaatccagtttccggatcatcggttacagtgaaaacgccagagaaatgttagggattatgcctcaatctgttcctactcttgagaaacctgagattctagctatgggaactgatgtgagatctttgttcacttcttcgagctcgattctactcgagcgtgctttcgttgctcgagagattaccttgttaaatccggtttggatccattccaagaatactggtaaaccgttttacgccattcttcataggattgatgttggtgttgttattgatttagagccagctagaactgaagatcctgcgctttctattgctggtgctgttcaatcgcagaaactcgcggttcgtgcgatttctcagttacaggctcttcctggtggagatattaagcttttgtgtgacactgtcgtggaaagtgtgagggacttgactggttatgatcgtgttatggtttataagtttcatgaagatgagcatggagaagttgtagctgagagtaaacgagatgatttagagccttatattggactgcatgttcctgctactgatattcctcaagcgtcaaggttcttgtttaagcagaaccgtgtccgaatgatagtagattgcaatgccacacctgttcttgtggtccaggacgataggctaactcagtctatgtgcttggttggttctactcttagggctcctcatggttgtcactctcagtatatggctaacatgggatctattgcgtctttagcaatggcggttataatcaatggaaatgaagatgatgggagcaatgtagctagtggaagaagctcgatgaggctttggggtttggttgtttgccatcacacttcttctcgctgcataccgtttccgctaaggtatgcttgtgagtttttgatgcaggctttcggtttacagttaaacatggaattgcagttagctttgcaaatgtcagagaaacgcgttttgagaacgcagacactgttatgtgatatgcttctgcgtgactcgcctgctggaattgttacacagagtcccagtatcatggacttagtgaaatgtgacggtgcagcatttctttaccacgggaagtattacccgttgggtgttgctcctagtgaagttcagataaaagatgttgtggagtggttgcttgcgaatcatgcggattcaaccggattaagcactgatagtttaggcgatgcggggtatcccggtgcagctgcgttaggggatgctgtgtgcggtatggcagttgcatatatcacaaaaagagactttcttttttggtttcgatctcacactgcgaaagaaatcaaatggggaggcgctaagcatcatccggaggataaagatgatgggcaacgaatgcatcctcgttcgtcctttcaggcttttcttgaagttgttaagagccggagtcagccatgggaaactgcggaaatggatgcgattcactcgctccagcttattctgagagactcttttaaagaatctgaggcggctatgaactctaaagttgtggatggtgtggttcagccatgtagggatatggcgggggaacaggggattgatgagttaggtgcagttgcaagagagatggttaggctcattgagactgcaactgttcctatattcgctgtggatgccggaggctgcatcaatggatggaacgctaagattgcagagttgacaggtctctcagttgaagaagctatggggaagtctctggtttctgatttaatatacaaagagaatgaagcaactgtcaataagcttctttctcgtgctttgagaggggacgaggaaaagaatgtggaggttaagctgaaaactttcagccccgaactacaagggaaagcagtttttgtggttgtgaatgcttgttccagcaaggactacttgaacaacattgtcggcgtttgttttgttggacaagacgttactagtcagaaaatcgtaatggataagttcatcaacatacaaggagattacaaggctattgtacatagcccaaaccctctaatcccgccaatttttgctgctgacgagaacacgtgctgcctggaatggaacatggcgatggaaaagcttacgggttggtctcgcagtgaagtgattgggaaaatgattgtcggggaagtgtttgggagctgttgcatgctaaagggtcctgatgctttaaccaagttcatgattgtattgcataatgcgattggtggccaagatacggataagttccctttcccattctttgaccgcaatgggaagtttgttcaggctctattgactgcaaacaagcgggttagcctcgagggaaaggttattggggctttctgtttcttgcaaatcccgagccctgagctgcagcaagctttagcagtccaacggaggcaggacacagagtgtttcacgaaggcaaaagagttggcttatatttgtcaggtgataaagaatcctttgagcggtatgcgtttcgcaaactcattgttggaggccacagacttgaacgaggaccagaagcagttacttgaaacaagtgtttcttgcgagaaacagatctcaaggatcgtcggggacatggatcttgaaagcattgaagacggttcatttgtgctaaagagggaagagtttttccttggaagtgtcataaacgcgattgtaagtcaagcgatgttcttattaagggacagaggtcttcagctgatccgtgacattcccgaagagatcaaatcaatagaggtttttggagaccagataaggattcaacagctcctggctgagtttctgctgagtataatccggtatgcaccatctcaagagtgggtggagatccatttaagccaactttcaaagcaaatggctgatggattcgccgccatccgcacagaattcagaatggcgtgtccaggtgaaggtctgcctccagagctagtccgagacatgttccatagcagcaggtggacaagccctgaaggtttaggtctaagcgtatgtcgaaagattttaaagctaatgaacggtgaggttcaatacatccgagaatcagaacggtcctatttcctcatcattctggaactccctgtacctcgaaagcgaccattgtcaactgctagtggaagtggtgacatgatgctgatgatgccatattagatggtttccggagtcgggggtagtggcggtggccgtggcggtggccgtggcggagaagaagaaccgtcgtcaagtcacactcctaataaccgaagaggaggagaacaagctcaatcgtcgggaacgaaatctctcagaccaagaagcaacactgaatcaatgagcaaagcaattcaacagtacaccgtcgacgcaagactccacgccgttttcgaacaatccggcgaatcagggaaatcattcgactactcacaatcactcaaaacgacgacgtacggttcctctgtacctgagcaacagatcacagcttatctctctcgaatccagcgaggtggttacattcagcctttcggatgtatgatcgccgtcgatgaatccagtttccggatcatcggttacagtgaaaacgccagagaaatgttagggattatgcctcaatctgttcctactcttgagaaacctgagattctagctatgggaactgatgtgagatctttgttcacttcttcgagctcgattctactcgagcgtgctttcgttgctcgagagattaccttgttaaatccggtttggatccattccaagaatactggtaaaccgttttacgccattcttcataggattgatgttggtgttgttattgatttagagccagctagaactgaagatcctgcgctttctattgctggtgctgttcaatcgcagaaactcgcggttcgtgcgatttctcagttacaggctcttcctggtggagatattaagcttttgtgtgacactgtcgtggaaagtgtgagggacttgactggttatgatcgtgttatggtttataagtttcatgaagatgagcatggagaagttgtagctgagagtaaacgagatgatttagagccttatattggactgcatgttcctgctactgatattcctcaagcgtcaaggttcttgtttaagcagaaccgtgtccgaatgatagtagattgcaatgccacacctgttcttgtggtccaggacgataggctaactcagtctatgtgcttggttggttctactcttagggctcctcatggttgtcactctcagtatatggctaacatgggatctattgcgtctttagcaatggcggttataatcaatggaaatgaagatgatgggagcaatgtagctagtggaagaagctcgatgaggctttggggtttggttgtttgccatcacacttcttctcgctgcataccgtttccgctaaggtatgcttgtgagtttttgatgcaggctttcggtttacagttaaacatggaattgcagttagctttgcaaatgtcagagaaacgcgttttgagaacgcagacactgttatgtgatatgcttctgcgtgactcgcctgctggaattgttacacagagtcccagtatcatggacttagtgaaatgtgacggtgcagcatttctttaccacgggaagtattacccgttgggtgttgctcctagtgaagttcagataaaagatgttgtggagtggttgcttgcgaatcatgcggattcaaccggattaagcactgatagtttaggcgatgcggggtatcccggtgcagctgcgttaggggatgctgtgtgcggtatggcagttgcatatatcacaaaaagagactttcttttttggtttcgatctcacactgcgaaagaaatcaaatggggaggcgctaagcatcatccggaggataaagatgatgggcaacgaatgcatcctcgttcgtcctttcaggcttttcttgaagttgttaagagccggagtcagccatgggaaactgcggaaatggatgcgattcactcgctccagcttattctgagagactcttttaaagaatctgaggcggctatgaactctaaagttgtggatggtgtggttcagccatgtagggatatggcgggggaacaggggattgatgagttaggtgcagttgcaagagagatggttaggctcattgagactgcaactgttcctatattcgctgtggatgccggaggctgcatcaatggatggaacgctaagattgcagagttgacaggtctctcagttgaagaagctatggggaagtctctggtttctgatttaatatacaaagagaatgaagcaactgtcaataagcttctttctcgtgctttgagaggggacgaggaaaagaatgtggaggttaagctgaaaactttcagccccgaactacaagggaaagcagtttttgtggttgtgaatgcttgttccagcaaggactacttgaacaacattgtcggcgtttgttttgttggacaagacgttactagtcagaaaatcgtaatggataagttcatcaacatacaaggagattacaaggctattgtacatagcccaaaccctctaatcccgccaatttttgctgctgacgagaacacgtgctgcctggaatggaacatggcgatggaaaagcttacgggttggtctcgcagtgaagtgattgggaaaatgattgtcggggaagtgtttgggagctgttgcatgctaaagggtcctgatgctttaaccaagttcatgattgtattgcataatgcgattggtggccaagatacggataagttccctttcccattctttgaccgcaatgggaagtttgttcaggctctattgactgcaaacaagcgggttagcctcgagggaaaggttattggggctttctgtttcttgcaaatcccgagccctgagctgcagcaagctttagcagtccaacggaggcaggacacagagtgtttcacgaaggcaaaagagttggcttatatttgtcaggtgataaagaatcctttgagcggtatgcgtttcgcaaactcattgttggaggccacagacttgaacgaggaccagaagcagttacttgaaacaagtgtttcttgcgagaaacagatctcaaggatcgtcggggacatggatcttgaaagcattgaagacggttcatttgtgctaaagagggaagagtttttccttggaagtgtcataaacgcgattgtaagtcaagcgatgttcttattaagggacagaggtcttcagctgatccgtgacattcccgaagagatcaaatcaatagaggtttttggagaccagataaggattcaacagctcctggctgagtttctgctgagtataatccggtatgcaccatctcaagagtgggtggagatccatttaagccaactttcaaagcaaatggctgatggattcgccgccatccgcacagaattcagaatggcgtgtccaggtgaaggtctgcctccagagctagtccgagacatgttccatagcagcaggtggacaagccctgaaggtttaggtctaagcgtatgtcgaaagattttaaagctaatgaacggtgaggttcaatacatccgagaatcagaacggtcctatttcctcatcattctggaactccctgtacctcgaaagcgaccattgtcaactgctagtggaagtggtgacatgatgctgatgatgccatattagatggtttccggagtcgggggtagtggcggtggccgtggcggtggccgtggcggagaagaagaaccgtcgtcaagtcacactcctaataaccgaagaggaggagaacaagctcaatcgtcgggaacgaaatctctcagaccaagaagcaacactgaatcaatgagcaaagcaattcaacagtacaccgtcgacgcaagactccacgccgttttcgaacaatccggcgaatcagggaaatcattcgactactcacaatcactcaaaacgacgacgtacggttcctctgtacctgagcaacagatcacagcttatctctctcgaatccagcgaggtggttacattcagcctttcggatgtatgatcgccgtcgatgaatccagtttccggatcatcggttacagtgaaaacgccagagaaatgttagggattatgcctcaatctgttcctactcttgagaaacctgagattctagctatgggaactgatgtgagatctttgttcacttcttcgagctcgattctactcgagcgtgctttcgttgctcgagagattaccttgttaaatccggtttggatccattccaagaatactggtaaaccgttttacgccattcttcataggattgatgttggtgttgttattgatttagagccagctagaactgaagatcctgcgctttctattgctggtgctgttcaatcgcagaaactcgcggttcgtgcgatttctcagttacaggctcttcctggtggagatattaagcttttgtgtgacactgtcgtggaaagtgtgagggacttgactggttatgatcgtgttatggtttataagtttcatgaagatgagcatggagaagttgtagctgagagtaaacgagatgatttagagccttatattggactgcatgttcctgctactgatattcctcaagcgtcaaggttcttgtttaagcagaaccgtgtccgaatgatagtagattgcaatgccacacctgttcttgtggtccaggacgataggctaactcagtctatgtgcttggttggttctactcttagggctcctcatggttgtcactctcagtatatggctaacatgggatctattgcgtctttagcaatggcggttataatcaatggaaatgaagatgatgggagcaatgtagctagtggaagaagctcgatgaggctttggggtttggttgtttgccatcacacttcttctcgctgcataccgtttccgctaaggtatgcttgtgagtttttgatgcaggctttcggtttacagttaaacatggaattgcagttagctttgcaaatgtcagagaaacgcgttttgagaacgcagacactgttatgtgatatgcttctgcgtgactcgcctgctggaattgttacacagagtcccagtatcatggacttagtgaaatgtgacggtgcagcatttctttaccacgggaagtattacccgttgggtgttgctcctagtgaagttcagataaaagatgttgtggagtggttgcttgcgaatcatgcggattcaaccggattaagcactgatagtttaggcgatgcggggtatcccggtgcagctgcgttaggggatgctgtgtgcggtatggcagttgcatatatcacaaaaagagactttcttttttggtttcgatctcacactgcgaaagaaatcaaatggggaggcgctaagcatcatccggaggataaagatgatgggcaacgaatgcatcctcgttcgtcctttcaggcttttcttgaagttgttaagagccggagtcagccatgggaaactgcggaaatggatgcgattcactcgctccagcttattctgagagactcttttaaagaatctgaggcggctatgaactctaaagttgtggatggtgtggttcagccatgtagggatatggcgggggaacaggggattgatgagttaggtgcagttgcaagagagatggttaggctcattgagactgcaactgttcctatattcgctgtggatgccggaggctgcatcaatggatggaacgctaagattgcagagttgacaggtctctcagttgaagaagctatggggaagtctctggtttctgatttaatatacaaagagaatgaagcaactgtcaataagcttctttctcgtgctttgagaggggacgaggaaaagaatgtggaggttaagctgaaaactttcagccccgaactacaagggaaagcagtttttgtggttgtgaatgcttgttccagcaaggactacttgaacaacattgtcggcgtttgttttgttggacaagacgttactagtcagaaaatcgtaatggataagttcatcaacatacaaggagattacaaggctattgtacatagcccaaaccctctaatcccgccaatttttgctgctgacgagaacacgtgctgcctggaatggaacatggcgatggaaaagcttacgggttggtctcgcagtgaagtgattgggaaaatgattgtcggggaagtgtttgggagctgttgcatgctaaagggtcctgatgctttaaccaagttcatgattgtattgcataatgcgattggtggccaagatacggataagttccctttcccattctttgaccgcaatgggaagtttgttcaggctctattgactgcaaacaagcgggttagcctcgagggaaaggttattggggctttctgtttcttgcaaatcccgagccctgagctgcagcaagctttagcagtccaacggaggcaggacacagagtgtttcacgaaggcaaaagagttggcttatatttgtcaggtgataaagaatcctttgagcggtatgcgtttcgcaaactcattgttggaggccacagacttgaacgaggaccagaagcagttacttgaaacaagtgtttcttgcgagaaacagatctcaaggatcgtcggggacatggatcttgaaagcattgaagacggttcatttgtgctaaagagggaagagtttttccttggaagtgtcataaacgcgattgtaagtcaagcgatgttcttattaagggacagaggtcttcagctgatccgtgacattcccgaagagatcaaatcaatagaggtttttggagaccagataaggattcaacagctcctggctgagtttctgctgagtataatccggtatgcaccatctcaagagtgggtggagatccatttaagccaactttcaaagcaaatggctgatggattcgccgccatccgcacagaattcagaatggcgtgtccaggtgaaggtctgcctccagagctagtccgagacatgttccatagcagcaggtggacaagccctgaaggtttaggtctaagcgtatgtcgaaagattttaaagctaatgaacggtgaggttcaatacatccgagaatcagaacggtcctatttcctcatcattctggaactccctgtacctcgaaagcgaccattgtcaactgctagtggaagtggtgacatgatgctgatgatgccatattagatggtttccggagtcgggggtagtggcggtggccgtggcggtggccgtggcggagaagaagaaccgtcgtcaagtcacactcctaataaccgaagaggaggagaacaagctcaatcgtcgggaacgaaatctctcagaccaagaagcaacactgaatcaatgagcaaagcaattcaacagtacaccgtcgacgcaagactccacgccgttttcgaacaatccggcgaatcagggaaatcattcgactactcacaatcactcaaaacgacgacgtacggttcctctgtacctgagcaacagatcacagcttatctctctcgaatccagcgaggtggttacattcagcctttcggatgtatgatcgccgtcgatgaatccagtttccggatcatcggttacagtgaaaacgccagagaaatgttagggattatgcctcaatctgttcctactcttgagaaacctgagattctagctatgggaactgatgtgagatctttgttcacttcttcgagctcgattctactcgagcgtgctttcgttgctcgagagattaccttgttaaatccggtttggatccattccaagaatactggtaaaccgttttacgccattcttcataggattgatgttggtgttgttattgatttagagccagctagaactgaagatcctgcgctttctattgctggtgctgttcaatcgcagaaactcgcggttcgtgcgatttctcagttacaggctcttcctggtggagatattaagcttttgtgtgacactgtcgtggaaagtgtgagggacttgactggttatgatcgtgttatggtttataagtttcatgaagatgagcatggagaagttgtagctgagagtaaacgagatgatttagagccttatattggactgcatgttcctgctactgatattcctcaagcgtcaaggttcttgtttaagcagaaccgtgtccgaatgatagtagattgcaatgccacacctgttcttgtggtccaggacgataggctaactcagtctatgtgcttggttggttctactcttagggctcctcatggttgtcactctcagtatatggctaacatgggatctattgcgtctttagcaatggcggttataatcaatggaaatgaagatgatgggagcaatgtagctagtggaagaagctcgatgaggctttggggtttggttgtttgccatcacacttcttctcgctgcataccgtttccgctaaggtatgcttgtgagtttttgatgcaggctttcggtttacagttaaacatggaattgcagttagctttgcaaatgtcagagaaacgcgttttgagaacgcagacactgttatgtgatatgcttctgcgtgactcgcctgctggaattgttacacagagtcccagtatcatggacttagtgaaatgtgacggtgcagcatttctttaccacgggaagtattacccgttgggtgttgctcctagtgaagttcagataaaagatgttgtggagtggttgcttgcgaatcatgcggattcaaccggattaagcactgatagtttaggcgatgcggggtatcccggtgcagctgcgttaggggatgctgtgtgcggtatggcagttgcatatatcacaaaaagagactttcttttttggtttcgatctcacactgcgaaagaaatcaaatggggaggcgctaagcatcatccggaggataaagatgatgggcaacgaatgcatcctcgttcgtcctttcaggcttttcttgaagttgttaagagccggagtcagccatgggaaactgcggaaatggatgcgattcactcgctccagcttattctgagagactcttttaaagaatctgaggcggctatgaactctaaagttgtggatggtgtggttcagccatgtagggatatggcgggggaacaggggattgatgagttaggtgcagttgcaagagagatggttaggctcattgagactgcaactgttcctatattcgctgtggatgccggaggctgcatcaatggatggaacgctaagattgcagagttgacaggtctctcagttgaagaagctatggggaagtctctggtttctgatttaatatacaaagagaatgaagcaactgtcaataagcttctttctcgtgctttgagaggggacgaggaaaagaatgtggaggttaagctgaaaactttcagccccgaactacaagggaaagcagtttttgtggttgtgaatgcttgttccagcaaggactacttgaacaacattgtcggcgtttgttttgttggacaagacgttactagtcagaaaatcgtaatggataagttcatcaacatacaaggagattacaaggctattgtacatagcccaaaccctctaatcccgccaatttttgctgctgacgagaacacgtgctgcctggaatggaacatggcgatggaaaagcttacgggttggtctcgcagtgaagtgattgggaaaatgattgtcggggaagtgtttgggagctgttgcatgctaaagggtcctgatgctttaaccaagttcatgattgtattgcataatgcgattggtggccaagatacggataagttccctttcccattctttgaccgcaatgggaagtttgttcaggctctattgactgcaaacaagcgggttagcctcgagggaaaggttattggggctttctgtttcttgcaaatcccgagccctgagctgcagcaagctttagcagtccaacggaggcaggacacagagtgtttcacgaaggcaaaagagttggcttatatttgtcaggtgataaagaatcctttgagcggtatgcgtttcgcaaactcattgttggaggccacagacttgaacgaggaccagaagcagttacttgaaacaagtgtttcttgcgagaaacagatctcaaggatcgtcggggacatggatcttgaaagcattgaagacggttcatttgtgctaaagagggaagagtttttccttggaagtgtcataaacgcgattgtaagtcaagcgatgttcttattaagggacagaggtcttcagctgatccgtgacattcccgaagagatcaaatcaatagaggtttttggagaccagataaggattcaacagctcctggctgagtttctgctgagtataatccggtatgcaccatctcaagagtgggtggagatccatttaagccaactttcaaagcaaatggctgatggattcgccgccatccgcacagaattcagaatggcgtgtccaggtgaaggtctgcctccagagctagtccgagacatgttccatagcagcaggtggacaagccctgaaggtttaggtctaagcgtatgtcgaaagattttaaagctaatgaacggtgaggttcaatacatccgagaatcagaacggtcctatttcctcatcattctggaactccctgtacctcgaaagcgaccattgtcaactgctagtggaagtggtgacatgatgctgatgatgccatattagatggtttccggagtcgggggtagtggcggtggccgtggcggtggccgtggcggagaagaagaaccgtcgtcaagtcacactcctaataaccgaagaggaggagaacaagctcaatcgtcgggaacgaaatctctcagaccaagaagcaacactgaatcaatgagcaaagcaattcaacagtacaccgtcgacgcaagactccacgccgttttcgaacaatccggcgaatcagggaaatcattcgactactcacaatcactcaaaacgacgacgtacggttcctctgtacctgagcaacagatcacagcttatctctctcgaatccagcgaggtggttacattcagcctttcggatgtatgatcgccgtcgatgaatccagtttccggatcatcggttacagtgaaaacgccagagaaatgttagggattatgcctcaatctgttcctactcttgagaaacctgagattctagctatgggaactgatgtgagatctttgttcacttcttcgagctcgattctactcgagcgtgctttcgttgctcgagagattaccttgttaaatccggtttggatccattccaagaatactggtaaaccgttttacgccattcttcataggattgatgttggtgttgttattgatttagagccagctagaactgaagatcctgcgctttctattgctggtgctgttcaatcgcagaaactcgcggttcgtgcgatttctcagttacaggctcttcctggtggagatattaagcttttgtgtgacactgtcgtggaaagtgtgagggacttgactggttatgatcgtgttatggtttataagtttcatgaagatgagcatggagaagttgtagctgagagtaaacgagatgatttagagccttatattggactgcatgttcctgctactgatattcctcaagcgtcaaggttcttgtttaagcagaaccgtgtccgaatgatagtagattgcaatgccacacctgttcttgtggtccaggacgataggctaactcagtctatgtgcttggttggttctactcttagggctcctcatggttgtcactctcagtatatggctaacatgggatctattgcgtctttagcaatggcggttataatcaatggaaatgaagatgatgggagcaatgtagctagtggaagaagctcgatgaggctttggggtttggttgtttgccatcacacttcttctcgctgcataccgtttccgctaaggtatgcttgtgagtttttgatgcaggctttcggtttacagttaaacatggaattgcagttagctttgcaaatgtcagagaaacgcgttttgagaacgcagacactgttatgtgatatgcttctgcgtgactcgcctgctggaattgttacacagagtcccagtatcatggacttagtgaaatgtgacggtgcagcatttctttaccacgggaagtattacccgttgggtgttgctcctagtgaagttcagataaaagatgttgtggagtggttgcttgcgaatcatgcggattcaaccggattaagcactgatagtttaggcgatgcggggtatcccggtgcagctgcgttaggggatgctgtgtgcggtatggcagttgcatatatcacaaaaagagactttcttttttggtttcgatctcacactgcgaaagaaatcaaatggggaggcgctaagcatcatccggaggataaagatgatgggcaacgaatgcatcctcgttcgtcctttcaggcttttcttgaagttgttaagagccggagtcagccatgggaaactgcggaaatggatgcgattcactcgctccagcttattctgagagactcttttaaagaatctgaggcggctatgaactctaaagttgtggatggtgtggttcagccatgtagggatatggcgggggaacaggggattgatgagttaggtgcagttgcaagagagatggttaggctcattgagactgcaactgttcctatattcgctgtggatgccggaggctgcatcaatggatggaacgctaagattgcagagttgacaggtctctcagttgaagaagctatggggaagtctctggtttctgatttaatatacaaagagaatgaagcaactgtcaataagcttctttctcgtgctttgagaggggacgaggaaaagaatgtggaggttaagctgaaaactttcagccccgaactacaagggaaagcagtttttgtggttgtgaatgcttgttccagcaaggactacttgaacaacattgtcggcgtttgttttgttggacaagacgttactagtcagaaaatcgtaatggataagttcatcaacatacaaggagattacaaggctattgtacatagcccaaaccctctaatcccgccaatttttgctgctgacgagaacacgtgctgcctggaatggaacatggcgatggaaaagcttacgggttggtctcgcagtgaagtgattgggaaaatgattgtcggggaagtgtttgggagctgttgcatgctaaagggtcctgatgctttaaccaagttcatgattgtattgcataatgcgattggtggccaagatacggataagttccctttcccattctttgaccgcaatgggaagtttgttcaggctctattgactgcaaacaagcgggttagcctcgagggaaaggttattggggctttctgtttcttgcaaatcccgagccctgagctgcagcaagctttagcagtccaacggaggcaggacacagagtgtttcacgaaggcaaaagagttggcttatatttgtcaggtgataaagaatcctttgagcggtatgcgtttcgcaaactcattgttggaggccacagacttgaacgaggaccagaagcagttacttgaaacaagtgtttcttgcgagaaacagatctcaaggatcgtcggggacatggatcttgaaagcattgaagacggttcatttgtgctaaagagggaagagtttttccttggaagtgtcataaacgcgattgtaagtcaagcgatgttcttattaagggacagaggtcttcagctgatccgtgacattcccgaagagatcaaatcaatagaggtttttggagaccagataaggattcaacagctcctggctgagtttctgctgagtataatccggtatgcaccatctcaagagtgggtggagatccatttaagccaactttcaaagcaaatggctgatggattcgccgccatccgcacagaattcagaatggcgtgtccaggtgaaggtctgcctccagagctagtccgagacatgttccatagcagcaggtggacaagccctgaaggtttaggtctaagcgtatgtcgaaagattttaaagctaatgaacggtgaggttcaatacatccgagaatcagaacggtcctatttcctcatcattctggaactccctgtacctcgaaagcgaccattgtcaactgctagtggaagtggtgacatgatgctgatgatgccatattagatggtttccggagtcgggggtagtggcggtggccgtggcggtggccgtggcggagaagaagaaccgtcgtcaagtcacactcctaataaccgaagaggaggagaacaagctcaatcgtcgggaacgaaatctctcagaccaagaagcaacactgaatcaatgagcaaagcaattcaacagtacaccgtcgacgcaagactccacgccgttttcgaacaatccggcgaatcagggaaatcattcgactactcacaatcactcaaaacgacgacgtacggttcctctgtacctgagcaacagatcacagcttatctctctcgaatccagcgaggtggttacattcagcctttcggatgtatgatcgccgtcgatgaatccagtttccggatcatcggttacagtgaaaacgccagagaaatgttagggattatgcctcaatctgttcctactcttgagaaacctgagattctagctatgggaactgatgtgagatctttgttcacttcttcgagctcgattctactcgagcgtgctttcgttgctcgagagattaccttgttaaatccggtttggatccattccaagaatactggtaaaccgttttacgccattcttcataggattgatgttggtgttgttattgatttagagccagctagaactgaagatcctgcgctttctattgctggtgctgttcaatcgcagaaactcgcggttcgtgcgatttctcagttacaggctcttcctggtggagatattaagcttttgtgtgacactgtcgtggaaagtgtgagggacttgactggttatgatcgtgttatggtttataagtttcatgaagatgagcatggagaagttgtagctgagagtaaacgagatgatttagagccttatattggactgcatgttcctgctactgatattcctcaagcgtcaaggttcttgtttaagcagaaccgtgtccgaatgatagtagattgcaatgccacacctgttcttgtggtccaggacgataggctaactcagtctatgtgcttggttggttctactcttagggctcctcatggttgtcactctcagtatatggctaacatgggatctattgcgtctttagcaatggcggttataatcaatggaaatgaagatgatgggagcaatgtagctagtggaagaagctcgatgaggctttggggtttggttgtttgccatcacacttcttctcgctgcataccgtttccgctaaggtatgcttgtgagtttttgatgcaggctttcggtttacagttaaacatggaattgcagttagctttgcaaatgtcagagaaacgcgttttgagaacgcagacactgttatgtgatatgcttctgcgtgactcgcctgctggaattgttacacagagtcccagtatcatggacttagtgaaatgtgacggtgcagcatttctttaccacgggaagtattacccgttgggtgttgctcctagtgaagttcagataaaagatgttgtggagtggttgcttgcgaatcatgcggattcaaccggattaagcactgatagtttaggcgatgcggggtatcccggtgcagctgcgttaggggatgctgtgtgcggtatggcagttgcatatatcacaaaaagagactttcttttttggtttcgatctcacactgcgaaagaaatcaaatggggaggcgctaagcatcatccggaggataaagatgatgggcaacgaatgcatcctcgttcgtcctttcaggcttttcttgaagttgttaagagccggagtcagccatgggaaactgcggaaatggatgcgattcactcgctccagcttattctgagagactcttttaaagaatctgaggcggctatgaactctaaagttgtggatggtgtggttcagccatgtagggatatggcgggggaacaggggattgatgagttaggtgcagttgcaagagagatggttaggctcattgagactgcaactgttcctatattcgctgtggatgccggaggctgcatcaatggatggaacgctaagattgcagagttgacaggtctctcagttgaagaagctatggggaagtctctggtttctgatttaatatacaaagagaatgaagcaactgtcaataagcttctttctcgtgctttgagaggggacgaggaaaagaatgtggaggttaagctgaaaactttcagccccgaactacaagggaaagcagtttttgtggttgtgaatgcttgttccagcaaggactacttgaacaacattgtcggcgtttgttttgttggacaagacgttactagtcagaaaatcgtaatggataagttcatcaacatacaaggagattacaaggctattgtacatagcccaaaccctctaatcccgccaatttttgctgctgacgagaacacgtgctgcctggaatggaacatggcgatggaaaagcttacgggttggtctcgcagtgaagtgattgggaaaatgattgtcggggaagtgtttgggagctgttgcatgctaaagggtcctgatgctttaaccaagttcatgattgtattgcataatgcgattggtggccaagatacggataagttccctttcccattctttgaccgcaatgggaagtttgttcaggctctattgactgcaaacaagcgggttagcctcgagggaaaggttattggggctttctgtttcttgcaaatcccgagccctgagctgcagcaagctttagcagtccaacggaggcaggacacagagtgtttcacgaaggcaaaagagttggcttatatttgtcaggtgataaagaatcctttgagcggtatgcgtttcgcaaactcattgttggaggccacagacttgaacgaggaccagaagcagttacttgaaacaagtgtttcttgcgagaaacagatctcaaggatcgtcggggacatggatcttgaaagcattgaagacggttcatttgtgctaaagagggaagagtttttccttggaagtgtcataaacgcgattgtaagtcaagcgatgttcttattaagggacagaggtcttcagctgatccgtgacattcccgaagagatcaaatcaatagaggtttttggagaccagataaggattcaacagctcctggctgagtttctgctgagtataatccggtatgcaccatctcaagagtgggtggagatccatttaagccaactttcaaagcaaatggctgatggattcgccgccatccgcacagaattcagaatggcgtgtccaggtgaaggtctgcctccagagctagtccgagacatgttccatagcagcaggtggacaagccctgaaggtttaggtctaagcgtatgtcgaaagattttaaagctaatgaacggtgaggttcaatacatccgagaatcagaacggtcctatttcctcatcattctggaactccctgtacctcgaaagcgaccattgtcaactgctagtggaagtggtgacatgatgctgatgatgccatattagatggtttccggagtcgggggtagtggcggtggccgtggcggtggccgtggcggagaagaagaaccgtcgtcaagtcacactcctaataaccgaagaggaggagaacaagctcaatcgtcgggaacgaaatctctcagaccaagaagcaacactgaatcaatgagcaaagcaattcaacagtacaccgtcgacgcaagactccacgccgttttcgaacaatccggcgaatcagggaaatcattcgactactcacaatcactcaaaacgacgacgtacggttcctctgtacctgagcaacagatcacagcttatctctctcgaatccagcgaggtggttacattcagcctttcggatgtatgatcgccgtcgatgaatccagtttccggatcatcggttacagtgaaaacgccagagaaatgttagggattatgcctcaatctgttcctactcttgagaaacctgagattctagctatgggaactgatgtgagatctttgttcacttcttcgagctcgattctactcgagcgtgctttcgttgctcgagagattaccttgttaaatccggtttggatccattccaagaatactggtaaaccgttttacgccattcttcataggattgatgttggtgttgttattgatttagagccagctagaactgaagatcctgcgctttctattgctggtgctgttcaatcgcagaaactcgcggttcgtgcgatttctcagttacaggctcttcctggtggagatattaagcttttgtgtgacactgtcgtggaaagtgtgagggacttgactggttatgatcgtgttatggtttataagtttcatgaagatgagcatggagaagttgtagctgagagtaaacgagatgatttagagccttatattggactgcatgttcctgctactgatattcctcaagcgtcaaggttcttgtttaagcagaaccgtgtccgaatgatagtagattgcaatgccacacctgttcttgtggtccaggacgataggctaactcagtctatgtgcttggttggttctactcttagggctcctcatggttgtcactctcagtatatggctaacatgggatctattgcgtctttagcaatggcggttataatcaatggaaatgaagatgatgggagcaatgtagctagtggaagaagctcgatgaggctttggggtttggttgtttgccatcacacttcttctcgctgcataccgtttccgctaaggtatgcttgtgagtttttgatgcaggctttcggtttacagttaaacatggaattgcagttagctttgcaaatgtcagagaaacgcgttttgagaacgcagacactgttatgtgatatgcttctgcgtgactcgcctgctggaattgttacacagagtcccagtatcatggacttagtgaaatgtgacggtgcagcatttctttaccacgggaagtattacccgttgggtgttgctcctagtgaagttcagataaaagatgttgtggagtggttgcttgcgaatcatgcggattcaaccggattaagcactgatagtttaggcgatgcggggtatcccggtgcagctgcgttaggggatgctgtgtgcggtatggcagttgcatatatcacaaaaagagactttcttttttggtttcgatctcacactgcgaaagaaatcaaatggggaggcgctaagcatcatccggaggataaagatgatgggcaacgaatgcatcctcgttcgtcctttcaggcttttcttgaagttgttaagagccggagtcagccatgggaaactgcggaaatggatgcgattcactcgctccagcttattctgagagactcttttaaagaatctgaggcggctatgaactctaaagttgtggatggtgtggttcagccatgtagggatatggcgggggaacaggggattgatgagttaggtgcagttgcaagagagatggttaggctcattgagactgcaactgttcctatattcgctgtggatgccggaggctgcatcaatggatggaacgctaagattgcagagttgacaggtctctcagttgaagaagctatggggaagtctctggtttctgatttaatatacaaagagaatgaagcaactgtcaataagcttctttctcgtgctttgagaggggacgaggaaaagaatgtggaggttaagctgaaaactttcagccccgaactacaagggaaagcagtttttgtggttgtgaatgcttgttccagcaaggactacttgaacaacattgtcggcgtttgttttgttggacaagacgttactagtcagaaaatcgtaatggataagttcatcaacatacaaggagattacaaggctattgtacatagcccaaaccctctaatcccgccaatttttgctgctgacgagaacacgtgctgcctggaatggaacatggcgatggaaaagcttacgggttggtctcgcagtgaagtgattgggaaaatgattgtcggggaagtgtttgggagctgttgcatgctaaagggtcctgatgctttaaccaagttcatgattgtattgcataatgcgattggtggccaagatacggataagttccctttcccattctttgaccgcaatgggaagtttgttcaggctctattgactgcaaacaagcgggttagcctcgagggaaaggttattggggctttctgtttcttgcaaatcccgagccctgagctgcagcaagctttagcagtccaacggaggcaggacacagagtgtttcacgaaggcaaaagagttggcttatatttgtcaggtgataaagaatcctttgagcggtatgcgtttcgcaaactcattgttggaggccacagacttgaacgaggaccagaagcagttacttgaaacaagtgtttcttgcgagaaacagatctcaaggatcgtcggggacatggatcttgaaagcattgaagacggttcatttgtgctaaagagggaagagtttttccttggaagtgtcataaacgcgattgtaagtcaagcgatgttcttattaagggacagaggtcttcagctgatccgtgacattcccgaagagatcaaatcaatagaggtttttggagaccagataaggattcaacagctcctggctgagtttctgctgagtataatccggtatgcaccatctcaagagtgggtggagatccatttaagccaactttcaaagcaaatggctgatggattcgccgccatccgcacagaattcagaatggcgtgtccaggtgaaggtctgcctccagagctagtccgagacatgttccatagcagcaggtggacaagccctgaaggtttaggtctaagcgtatgtcgaaagattttaaagctaatgaacggtgaggttcaatacatccgagaatcagaacggtcctatttcctcatcattctggaactccctgtacctcgaaagcgaccattgtcaactgctagtggaagtggtgacatgatgctgatgatgccatattagatggtttccggagtcgggggtagtggcggtggccgtggcggtggccgtggcggagaagaagaaccgtcgtcaagtcacactcctaataaccgaagaggaggagaacaagctcaatcgtcgggaacgaaatctctcagaccaagaagcaacactgaatcaatgagcaaagcaattcaacagtacaccgtcgacgcaagactccacgccgttttcgaacaatccggcgaatcagggaaatcattcgactactcacaatcactcaaaacgacgacgtacggttcctctgtacctgagcaacagatcacagcttatctctctcgaatccagcgaggtggttacattcagcctttcggatgtatgatcgccgtcgatgaatccagtttccggatcatcggttacagtgaaaacgccagagaaatgttagggattatgcctcaatctgttcctactcttgagaaacctgagattctagctatgggaactgatgtgagatctttgttcacttcttcgagctcgattctactcgagcgtgctttcgttgctcgagagattaccttgttaaatccggtttggatccattccaagaatactggtaaaccgttttacgccattcttcataggattgatgttggtgttgttattgatttagagccagctagaactgaagatcctgcgctttctattgctggtgctgttcaatcgcagaaactcgcggttcgtgcgatttctcagttacaggctcttcctggtggagatattaagcttttgtgtgacactgtcgtggaaagtgtgagggacttgactggttatgatcgtgttatggtttataagtttcatgaagatgagcatggagaagttgtagctgagagtaaacgagatgatttagagccttatattggactgcatgttcctgctactgatattcctcaagcgtcaaggttcttgtttaagcagaaccgtgtccgaatgatagtagattgcaatgccacacctgttcttgtggtccaggacgataggctaactcagtctatgtgcttggttggttctactcttagggctcctcatggttgtcactctcagtatatggctaacatgggatctattgcgtctttagcaatggcggttataatcaatggaaatgaagatgatgggagcaatgtagctagtggaagaagctcgatgaggctttggggtttggttgtttgccatcacacttcttctcgctgcataccgtttccgctaaggtatgcttgtgagtttttgatgcaggctttcggtttacagttaaacatggaattgcagttagctttgcaaatgtcagagaaacgcgttttgagaacgcagacactgttatgtgatatgcttctgcgtgactcgcctgctggaattgttacacagagtcccagtatcatggacttagtgaaatgtgacggtgcagcatttctttaccacgggaagtattacccgttgggtgttgctcctagtgaagttcagataaaagatgttgtggagtggttgcttgcgaatcatgcggattcaaccggattaagcactgatagtttaggcgatgcggggtatcccggtgcagctgcgttaggggatgctgtgtgcggtatggcagttgcatatatcacaaaaagagactttcttttttggtttcgatctcacactgcgaaagaaatcaaatggggaggcgctaagcatcatccggaggataaagatgatgggcaacgaatgcatcctcgttcgtcctttcaggcttttcttgaagttgttaagagccggagtcagccatgggaaactgcggaaatggatgcgattcactcgctccagcttattctgagagactcttttaaagaatctgaggcggctatgaactctaaagttgtggatggtgtggttcagccatgtagggatatggcgggggaacaggggattgatgagttaggtgcagttgcaagagagatggttaggctcattgagactgcaactgttcctatattcgctgtggatgccggaggctgcatcaatggatggaacgctaagattgcagagttgacaggtctctcagttgaagaagctatggggaagtctctggtttctgatttaatatacaaagagaatgaagcaactgtcaataagcttctttctcgtgctttgagaggggacgaggaaaagaatgtggaggttaagctgaaaactttcagccccgaactacaagggaaagcagtttttgtggttgtgaatgcttgttccagcaaggactacttgaacaacattgtcggcgtttgttttgttggacaagacgttactagtcagaaaatcgtaatggataagttcatcaacatacaaggagattacaaggctattgtacatagcccaaaccctctaatcccgccaatttttgctgctgacgagaacacgtgctgcctggaatggaacatggcgatggaaaagcttacgggttggtctcgcagtgaagtgattgggaaaatgattgtcggggaagtgtttgggagctgttgcatgctaaagggtcctgatgctttaaccaagttcatgattgtattgcataatgcgattggtggccaagatacggataagttccctttcccattctttgaccgcaatgggaagtttgttcaggctctattgactgcaaacaagcgggttagcctcgagggaaaggttattggggctttctgtttcttgcaaatcccgagccctgagctgcagcaagctttagcagtccaacggaggcaggacacagagtgtttcacgaaggcaaaagagttggcttatatttgtcaggtgataaagaatcctttgagcggtatgcgtttcgcaaactcattgttggaggccacagacttgaacgaggaccagaagcagttacttgaaacaagtgtttcttgcgagaaacagatctcaaggatcgtcggggacatggatcttgaaagcattgaagacggttcatttgtgctaaagagggaagagtttttccttggaagtgtcataaacgcgattgtaagtcaagcgatgttcttattaagggacagaggtcttcagctgatccgtgacattcccgaagagatcaaatcaatagaggtttttggagaccagataaggattcaacagctcctggctgagtttctgctgagtataatccggtatgcaccatctcaagagtgggtggagatccatttaagccaactttcaaagcaaatggctgatggattcgccgccatccgcacagaattcagaatggcgtgtccaggtgaaggtctgcctccagagctagtccgagacatgttccatagcagcaggtggacaagccctgaaggtttaggtctaagcgtatgtcgaaagattttaaagctaatgaacggtgaggttcaatacatccgagaatcagaacggtcctatttcctcatcattctggaactccctgtacctcgaaagcgaccattgtcaactgctagtggaagtggtgacatgatgctgatgatgccatattagatggtttccggagtcgggggtagtggcggtggccgtggcggtggccgtggcggagaagaagaaccgtcgtcaagtcacactcctaataaccgaagaggaggagaacaagctcaatcgtcgggaacgaaatctctcagaccaagaagcaacactgaatcaatgagcaaagcaattcaacagtacaccgtcgacgcaagactccacgccgttttcgaacaatccggcgaatcagggaaatcattcgactactcacaatcactcaaaacgacgacgtacggttcctctgtacctgagcaacagatcacagcttatctctctcgaatccagcgaggtggttacattcagcctttcggatgtatgatcgccgtcgatgaatccagtttccggatcatcggttacagtgaaaacgccagagaaatgttagggattatgcctcaatctgttcctactcttgagaaacctgagattctagctatgggaactgatgtgagatctttgttcacttcttcgagctcgattctactcgagcgtgctttcgttgctcgagagattaccttgttaaatccggtttggatccattccaagaatactggtaaaccgttttacgccattcttcataggattgatgttggtgttgttattgatttagagccagctagaactgaagatcctgcgctttctattgctggtgctgttcaatcgcagaaactcgcggttcgtgcgatttctcagttacaggctcttcctggtggagatattaagcttttgtgtgacactgtcgtggaaagtgtgagggacttgactggttatgatcgtgttatggtttataagtttcatgaagatgagcatggagaagttgtagctgagagtaaacgagatgatttagagccttatattggactgcatgttcctgctactgatattcctcaagcgtcaaggttcttgtttaagcagaaccgtgtccgaatgatagtagattgcaatgccacacctgttcttgtggtccaggacgataggctaactcagtctatgtgcttggttggttctactcttagggctcctcatggttgtcactctcagtatatggctaacatgggatctattgcgtctttagcaatggcggttataatcaatggaaatgaagatgatgggagcaatgtagctagtggaagaagctcgatgaggctttggggtttggttgtttgccatcacacttcttctcgctgcataccgtttccgctaaggtatgcttgtgagtttttgatgcaggctttcggtttacagttaaacatggaattgcagttagctttgcaaatgtcagagaaacgcgttttgagaacgcagacactgttatgtgatatgcttctgcgtgactcgcctgctggaattgttacacagagtcccagtatcatggacttagtgaaatgtgacggtgcagcatttctttaccacgggaagtattacccgttgggtgttgctcctagtgaagttcagataaaagatgttgtggagtggttgcttgcgaatcatgcggattcaaccggattaagcactgatagtttaggcgatgcggggtatcccggtgcagctgcgttaggggatgctgtgtgcggtatggcagttgcatatatcacaaaaagagactttcttttttggtttcgatctcacactgcgaaagaaatcaaatggggaggcgctaagcatcatccggaggataaagatgatgggcaacgaatgcatcctcgttcgtcctttcaggcttttcttgaagttgttaagagccggagtcagccatgggaaactgcggaaatggatgcgattcactcgctccagcttattctgagagactcttttaaagaatctgaggcggctatgaactctaaagttgtggatggtgtggttcagccatgtagggatatggcgggggaacaggggattgatgagttaggtgcagttgcaagagagatggttaggctcattgagactgcaactgttcctatattcgctgtggatgccggaggctgcatcaatggatggaacgctaagattgcagagttgacaggtctctcagttgaagaagctatggggaagtctctggtttctgatttaatatacaaagagaatgaagcaactgtcaataagcttctttctcgtgctttgagaggggacgaggaaaagaatgtggaggttaagctgaaaactttcagccccgaactacaagggaaagcagtttttgtggttgtgaatgcttgttccagcaaggactacttgaacaacattgtcggcgtttgttttgttggacaagacgttactagtcagaaaatcgtaatggataagttcatcaacatacaaggagattacaaggctattgtacatagcccaaaccctctaatcccgccaatttttgctgctgacgagaacacgtgctgcctggaatggaacatggcgatggaaaagcttacgggttggtctcgcagtgaagtgattgggaaaatgattgtcggggaagtgtttgggagctgttgcatgctaaagggtcctgatgctttaaccaagttcatgattgtattgcataatgcgattggtggccaagatacggataagttccctttcccattctttgaccgcaatgggaagtttgttcaggctctattgactgcaaacaagcgggttagcctcgagggaaaggttattggggctttctgtttcttgcaaatcccgagccctgagctgcagcaagctttagcagtccaacggaggcaggacacagagtgtttcacgaaggcaaaagagttggcttatatttgtcaggtgataaagaatcctttgagcggtatgcgtttcgcaaactcattgttggaggccacagacttgaacgaggaccagaagcagttacttgaaacaagtgtttcttgcgagaaacagatctcaaggatcgtcggggacatggatcttgaaagcattgaagacggttcatttgtgctaaagagggaagagtttttccttggaagtgtcataaacgcgattgtaagtcaagcgatgttcttattaagggacagaggtcttcagctgatccgtgacattcccgaagagatcaaatcaatagaggtttttggagaccagataaggattcaacagctcctggctgagtttctgctgagtataatccggtatgcaccatctcaagagtgggtggagatccatttaagccaactttcaaagcaaatggctgatggattcgccgccatccgcacagaattcagaatggcgtgtccaggtgaaggtctgcctccagagctagtccgagacatgttccatagcagcaggtggacaagccctgaaggtttaggtctaagcgtatgtcgaaagattttaaagctaatgaacggtgaggttcaatacatccgagaatcagaacggtcctatttcctcatcattctggaactccctgtacctcgaaagcgaccattgtcaactgctagtggaagtggtgacatgatgctgatgatgccatattagatggtttccggagtcgggggtagtggcggtggccgtggcggtggccgtggcggagaagaagaaccgtcgtcaagtcacactcctaataaccgaagaggaggagaacaagctcaatcgtcgggaacgaaatctctcagaccaagaagcaacactgaatcaatgagcaaagcaattcaacagtacaccgtcgacgcaagactccacgccgttttcgaacaatccggcgaatcagggaaatcattcgactactcacaatcactcaaaacgacgacgtacggttcctctgtacctgagcaacagatcacagcttatctctctcgaatccagcgaggtggttacattcagcctttcggatgtatgatcgccgtcgatgaatccagtttccggatcatcggttacagtgaaaacgccagagaaatgttagggattatgcctcaatctgttcctactcttgagaaacctgagattctagctatgggaactgatgtgagatctttgttcacttcttcgagctcgattctactcgagcgtgctttcgttgctcgagagattaccttgttaaatccggtttggatccattccaagaatactggtaaaccgttttacgccattcttcataggattgatgttggtgttgttattgatttagagccagctagaactgaagatcctgcgctttctattgctggtgctgttcaatcgcagaaactcgcggttcgtgcgatttctcagttacaggctcttcctggtggagatattaagcttttgtgtgacactgtcgtggaaagtgtgagggacttgactggttatgatcgtgttatggtttataagtttcatgaagatgagcatggagaagttgtagctgagagtaaacgagatgatttagagccttatattggactgcatgttcctgctactgatattcctcaagcgtcaaggttcttgtttaagcagaaccgtgtccgaatgatagtagattgcaatgccacacctgttcttgtggtccaggacgataggctaactcagtctatgtgcttggttggttctactcttagggctcctcatggttgtcactctcagtatatggctaacatgggatctattgcgtctttagcaatggcggttataatcaatggaaatgaagatgatgggagcaatgtagctagtggaagaagctcgatgaggctttggggtttggttgtttgccatcacacttcttctcgctgcataccgtttccgctaaggtatgcttgtgagtttttgatgcaggctttcggtttacagttaaacatggaattgcagttagctttgcaaatgtcagagaaacgcgttttgagaacgcagacactgttatgtgatatgcttctgcgtgactcgcctgctggaattgttacacagagtcccagtatcatggacttagtgaaatgtgacggtgcagcatttctttaccacgggaagtattacccgttgggtgttgctcctagtgaagttcagataaaagatgttgtggagtggttgcttgcgaatcatgcggattcaaccggattaagcactgatagtttaggcgatgcggggtatcccggtgcagctgcgttaggggatgctgtgtgcggtatggcagttgcatatatcacaaaaagagactttcttttttggtttcgatctcacactgcgaaagaaatcaaatggggaggcgctaagcatcatccggaggataaagatgatgggcaacgaatgcatcctcgttcgtcctttcaggcttttcttgaagttgttaagagccggagtcagccatgggaaactgcggaaatggatgcgattcactcgctccagcttattctgagagactcttttaaagaatctgaggcggctatgaactctaaagttgtggatggtgtggttcagccatgtagggatatggcgggggaacaggggattgatgagttaggtgcagttgcaagagagatggttaggctcattgagactgcaactgttcctatattcgctgtggatgccggaggctgcatcaatggatggaacgctaagattgcagagttgacaggtctctcagttgaagaagctatggggaagtctctggtttctgatttaatatacaaagagaatgaagcaactgtcaataagcttctttctcgtgctttgagaggggacgaggaaaagaatgtggaggttaagctgaaaactttcagccccgaactacaagggaaagcagtttttgtggttgtgaatgcttgttccagcaaggactacttgaacaacattgtcggcgtttgttttgttggacaagacgttactagtcagaaaatcgtaatggataagttcatcaacatacaaggagattacaaggctattgtacatagcccaaaccctctaatcccgccaatttttgctgctgacgagaacacgtgctgcctggaatggaacatggcgatggaaaagcttacgggttggtctcgcagtgaagtgattgggaaaatgattgtcggggaagtgtttgggagctgttgcatgctaaagggtcctgatgctttaaccaagttcatgattgtattgcataatgcgattggtggccaagatacggataagttccctttcccattctttgaccgcaatgggaagtttgttcaggctctattgactgcaaacaagcgggttagcctcgagggaaaggttattggggctttctgtttcttgcaaatcccgagccctgagctgcagcaagctttagcagtccaacggaggcaggacacagagtgtttcacgaaggcaaaagagttggcttatatttgtcaggtgataaagaatcctttgagcggtatgcgtttcgcaaactcattgttggaggccacagacttgaacgaggaccagaagcagttacttgaaacaagtgtttcttgcgagaaacagatctcaaggatcgtcggggacatggatcttgaaagcattgaagacggttcatttgtgctaaagagggaagagtttttccttggaagtgtcataaacgcgattgtaagtcaagcgatgttcttattaagggacagaggtcttcagctgatccgtgacattcccgaagagatcaaatcaatagaggtttttggagaccagataaggattcaacagctcctggctgagtttctgctgagtataatccggtatgcaccatctcaagagtgggtggagatccatttaagccaactttcaaagcaaatggctgatggattcgccgccatccgcacagaattcagaatggcgtgtccaggtgaaggtctgcctccagagctagtccgagacatgttccatagcagcaggtggacaagccctgaaggtttaggtctaagcgtatgtcgaaagattttaaagctaatgaacggtgaggttcaatacatccgagaatcagaacggtcctatttcctcatcattctggaactccctgtacctcgaaagcgaccattgtcaactgctagtggaagtggtgacatgatgctgatgatgccatattagatggtttccggagtcgggggtagtggcggtggccgtggcggtggccgtggcggagaagaagaaccgtcgtcaagtcacactcctaataaccgaagaggaggagaacaagctcaatcgtcgggaacgaaatctctcagaccaagaagcaacactgaatcaatgagcaaagcaattcaacagtacaccgtcgacgcaagactccacgccgttttcgaacaatccggcgaatcagggaaatcattcgactactcacaatcactcaaaacgacgacgtacggttcctctgtacctgagcaacagatcacagcttatctctctcgaatccagcgaggtggttacattcagcctttcggatgtatgatcgccgtcgatgaatccagtttccggatcatcggttacagtgaaaacgccagagaaatgttagggattatgcctcaatctgttcctactcttgagaaacctgagattctagctatgggaactgatgtgagatctttgttcacttcttcgagctcgattctactcgagcgtgctttcgttgctcgagagattaccttgttaaatccggtttggatccattccaagaatactggtaaaccgttttacgccattcttcataggattgatgttggtgttgttattgatttagagccagctagaactgaagatcctgcgctttctattgctggtgctgttcaatcgcagaaactcgcggttcgtgcgatttctcagttacaggctcttcctggtggagatattaagcttttgtgtgacactgtcgtggaaagtgtgagggacttgactggttatgatcgtgttatggtttataagtttcatgaagatgagcatggagaagttgtagctgagagtaaacgagatgatttagagccttatattggactgcatgttcctgctactgatattcctcaagcgtcaaggttcttgtttaagcagaaccgtgtccgaatgatagtagattgcaatgccacacctgttcttgtggtccaggacgataggctaactcagtctatgtgcttggttggttctactcttagggctcctcatggttgtcactctcagtatatggctaacatgggatctattgcgtctttagcaatggcggttataatcaatggaaatgaagatgatgggagcaatgtagctagtggaagaagctcgatgaggctttggggtttggttgtttgccatcacacttcttctcgctgcataccgtttccgctaaggtatgcttgtgagtttttgatgcaggctttcggtttacagttaaacatggaattgcagttagctttgcaaatgtcagagaaacgcgttttgagaacgcagacactgttatgtgatatgcttctgcgtgactcgcctgctggaattgttacacagagtcccagtatcatggacttagtgaaatgtgacggtgcagcatttctttaccacgggaagtattacccgttgggtgttgctcctagtgaagttcagataaaagatgttgtggagtggttgcttgcgaatcatgcggattcaaccggattaagcactgatagtttaggcgatgcggggtatcccggtgcagctgcgttaggggatgctgtgtgcggtatggcagttgcatatatcacaaaaagagactttcttttttggtttcgatctcacactgcgaaagaaatcaaatggggaggcgctaagcatcatccggaggataaagatgatgggcaacgaatgcatcctcgttcgtcctttcaggcttttcttgaagttgttaagagccggagtcagccatgggaaactgcggaaatggatgcgattcactcgctccagcttattctgagagactcttttaaagaatctgaggcggctatgaactctaaagttgtggatggtgtggttcagccatgtagggatatggcgggggaacaggggattgatgagttaggtgcagttgcaagagagatggttaggctcattgagactgcaactgttcctatattcgctgtggatgccggaggctgcatcaatggatggaacgctaagattgcagagttgacaggtctctcagttgaagaagctatggggaagtctctggtttctgatttaatatacaaagagaatgaagcaactgtcaataagcttctttctcgtgctttgagaggggacgaggaaaagaatgtggaggttaagctgaaaactttcagccccgaactacaagggaaagcagtttttgtggttgtgaatgcttgttccagcaaggactacttgaacaacattgtcggcgtttgttttgttggacaagacgttactagtcagaaaatcgtaatggataagttcatcaacatacaaggagattacaaggctattgtacatagcccaaaccctctaatcccgccaatttttgctgctgacgagaacacgtgctgcctggaatggaacatggcgatggaaaagcttacgggttggtctcgcagtgaagtgattgggaaaatgattgtcggggaagtgtttgggagctgttgcatgctaaagggtcctgatgctttaaccaagttcatgattgtattgcataatgcgattggtggccaagatacggataagttccctttcccattctttgaccgcaatgggaagtttgttcaggctctattgactgcaaacaagcgggttagcctcgagggaaaggttattggggctttctgtttcttgcaaatcccgagccctgagctgcagcaagctttagcagtccaacggaggcaggacacagagtgtttcacgaaggcaaaagagttggcttatatttgtcaggtgataaagaatcctttgagcggtatgcgtttcgcaaactcattgttggaggccacagacttgaacgaggaccagaagcagttacttgaaacaagtgtttcttgcgagaaacagatctcaaggatcgtcggggacatggatcttgaaagcattgaagacggttcatttgtgctaaagagggaagagtttttccttggaagtgtcataaacgcgattgtaagtcaagcgatgttcttattaagggacagaggtcttcagctgatccgtgacattcccgaagagatcaaatcaatagaggtttttggagaccagataaggattcaacagctcctggctgagtttctgctgagtataatccggtatgcaccatctcaagagtgggtggagatccatttaagccaactttcaaagcaaatggctgatggattcgccgccatccgcacagaattcagaatggcgtgtccaggtgaaggtctgcctccagagctagtccgagacatgttccatagcagcaggtggacaagccctgaaggtttaggtctaagcgtatgtcgaaagattttaaagctaatgaacggtgaggttcaatacatccgagaatcagaacggtcctatttcctcatcattctggaactccctgtacctcgaaagcgaccattgtcaactgctagtggaagtggtgacatgatgctgatgatgccatattagatggtttccggagtcgggggtagtggcggtggccgtggcggtggccgtggcggagaagaagaaccgtcgtcaagtcacactcctaataaccgaagaggaggagaacaagctcaatcgtcgggaacgaaatctctcagaccaagaagcaacactgaatcaatgagcaaagcaattcaacagtacaccgtcgacgcaagactccacgccgttttcgaacaatccggcgaatcagggaaatcattcgactactcacaatcactcaaaacgacgacgtacggttcctctgtacctgagcaacagatcacagcttatctctctcgaatccagcgaggtggttacattcagcctttcggatgtatgatcgccgtcgatgaatccagtttccggatcatcggttacagtgaaaacgccagagaaatgttagggattatgcctcaatctgttcctactcttgagaaacctgagattctagctatgggaactgatgtgagatctttgttcacttcttcgagctcgattctactcgagcgtgctttcgttgctcgagagattaccttgttaaatccggtttggatccattccaagaatactggtaaaccgttttacgccattcttcataggattgatgttggtgttgttattgatttagagccagctagaactgaagatcctgcgctttctattgctggtgctgttcaatcgcagaaactcgcggttcgtgcgatttctcagttacaggctcttcctggtggagatattaagcttttgtgtgacactgtcgtggaaagtgtgagggacttgactggttatgatcgtgttatggtttataagtttcatgaagatgagcatggagaagttgtagctgagagtaaacgagatgatttagagccttatattggactgcatgttcctgctactgatattcctcaagcgtcaaggttcttgtttaagcagaaccgtgtccgaatgatagtagattgcaatgccacacctgttcttgtggtccaggacgataggctaactcagtctatgtgcttggttggttctactcttagggctcctcatggttgtcactctcagtatatggctaacatgggatctattgcgtctttagcaatggcggttataatcaatggaaatgaagatgatgggagcaatgtagctagtggaagaagctcgatgaggctttggggtttggttgtttgccatcacacttcttctcgctgcataccgtttccgctaaggtatgcttgtgagtttttgatgcaggctttcggtttacagttaaacatggaattgcagttagctttgcaaatgtcagagaaacgcgttttgagaacgcagacactgttatgtgatatgcttctgcgtgactcgcctgctggaattgttacacagagtcccagtatcatggacttagtgaaatgtgacggtgcagcatttctttaccacgggaagtattacccgttgggtgttgctcctagtgaagttcagataaaagatgttgtggagtggttgcttgcgaatcatgcggattcaaccggattaagcactgatagtttaggcgatgcggggtatcccggtgcagctgcgttaggggatgctgtgtgcggtatggcagttgcatatatcacaaaaagagactttcttttttggtttcgatctcacactgcgaaagaaatcaaatggggaggcgctaagcatcatccggaggataaagatgatgggcaacgaatgcatcctcgttcgtcctttcaggcttttcttgaagttgttaagagccggagtcagccatgggaaactgcggaaatggatgcgattcactcgctccagcttattctgagagactcttttaaagaatctgaggcggctatgaactctaaagttgtggatggtgtggttcagccatgtagggatatggcgggggaacaggggattgatgagttaggtgcagttgcaagagagatggttaggctcattgagactgcaactgttcctatattcgctgtggatgccggaggctgcatcaatggatggaacgctaagattgcagagttgacaggtctctcagttgaagaagctatggggaagtctctggtttctgatttaatatacaaagagaatgaagcaactgtcaataagcttctttctcgtgctttgagaggggacgaggaaaagaatgtggaggttaagctgaaaactttcagccccgaactacaagggaaagcagtttttgtggttgtgaatgcttgttccagcaaggactacttgaacaacattgtcggcgtttgttttgttggacaagacgttactagtcagaaaatcgtaatggataagttcatcaacatacaaggagattacaaggctattgtacatagcccaaaccctctaatcccgccaatttttgctgctgacgagaacacgtgctgcctggaatggaacatggcgatggaaaagcttacgggttggtctcgcagtgaagtgattgggaaaatgattgtcggggaagtgtttgggagctgttgcatgctaaagggtcctgatgctttaaccaagttcatgattgtattgcataatgcgattggtggccaagatacggataagttccctttcccattctttgaccgcaatgggaagtttgttcaggctctattgactgcaaacaagcgggttagcctcgagggaaaggttattggggctttctgtttcttgcaaatcccgagccctgagctgcagcaagctttagcagtccaacggaggcaggacacagagtgtttcacgaaggcaaaagagttggcttatatttgtcaggtgataaagaatcctttgagcggtatgcgtttcgcaaactcattgttggaggccacagacttgaacgaggaccagaagcagttacttgaaacaagtgtttcttgcgagaaacagatctcaaggatcgtcggggacatggatcttgaaagcattgaagacggttcatttgtgctaaagagggaagagtttttccttggaagtgtcataaacgcgattgtaagtcaagcgatgttcttattaagggacagaggtcttcagctgatccgtgacattcccgaagagatcaaatcaatagaggtttttggagaccagataaggattcaacagctcctggctgagtttctgctgagtataatccggtatgcaccatctcaagagtgggtggagatccatttaagccaactttcaaagcaaatggctgatggattcgccgccatccgcacagaattcagaatggcgtgtccaggtgaaggtctgcctccagagctagtccgagacatgttccatagcagcaggtggacaagccctgaaggtttaggtctaagcgtatgtcgaaagattttaaagctaatgaacggtgaggttcaatacatccgagaatcagaacggtcctatttcctcatcattctggaactccctgtacctcgaaagcgaccattgtcaactgctagtggaagtggtgacatgatgctgatgatgccatattagatggtttccggagtcgggggtagtggcggtggccgtggcggtggccgtggcggagaagaagaaccgtcgtcaagtcacactcctaataaccgaagaggaggagaacaagctcaatcgtcgggaacgaaatctctcagaccaagaagcaacactgaatcaatgagcaaagcaattcaacagtacaccgtcgacgcaagactccacgccgttttcgaacaatccggcgaatcagggaaatcattcgactactcacaatcactcaaaacgacgacgtacggttcctctgtacctgagcaacagatcacagcttatctctctcgaatccagcgaggtggttacattcagcctttcggatgtatgatcgccgtcgatgaatccagtttccggatcatcggttacagtgaaaacgccagagaaatgttagggattatgcctcaatctgttcctactcttgagaaacctgagattctagctatgggaactgatgtgagatctttgttcacttcttcgagctcgattctactcgagcgtgctttcgttgctcgagagattaccttgttaaatccggtttggatccattccaagaatactggtaaaccgttttacgccattcttcataggattgatgttggtgttgttattgatttagagccagctagaactgaagatcctgcgctttctattgctggtgctgttcaatcgcagaaactcgcggttcgtgcgatttctcagttacaggctcttcctggtggagatattaagcttttgtgtgacactgtcgtggaaagtgtgagggacttgactggttatgatcgtgttatggtttataagtttcatgaagatgagcatggagaagttgtagctgagagtaaacgagatgatttagagccttatattggactgcatgttcctgctactgatattcctcaagcgtcaaggttcttgtttaagcagaaccgtgtccgaatgatagtagattgcaatgccacacctgttcttgtggtccaggacgataggctaactcagtctatgtgcttggttggttctactcttagggctcctcatggttgtcactctcagtatatggctaacatgggatctattgcgtctttagcaatggcggttataatcaatggaaatgaagatgatgggagcaatgtagctagtggaagaagctcgatgaggctttggggtttggttgtttgccatcacacttcttctcgctgcataccgtttccgctaaggtatgcttgtgagtttttgatgcaggctttcggtttacagttaaacatggaattgcagttagctttgcaaatgtcagagaaacgcgttttgagaacgcagacactgttatgtgatatgcttctgcgtgactcgcctgctggaattgttacacagagtcccagtatcatggacttagtgaaatgtgacggtgcagcatttctttaccacgggaagtattacccgttgggtgttgctcctagtgaagttcagataaaagatgttgtggagtggttgcttgcgaatcatgcggattcaaccggattaagcactgatagtttaggcgatgcggggtatcccggtgcagctgcgttaggggatgctgtgtgcggtatggcagttgcatatatcacaaaaagagactttcttttttggtttcgatctcacactgcgaaagaaatcaaatggggaggcgctaagcatcatccggaggataaagatgatgggcaacgaatgcatcctcgttcgtcctttcaggcttttcttgaagttgttaagagccggagtcagccatgggaaactgcggaaatggatgcgattcactcgctccagcttattctgagagactcttttaaagaatctgaggcggctatgaactctaaagttgtggatggtgtggttcagccatgtagggatatggcgggggaacaggggattgatgagttaggtgcagttgcaagagagatggttaggctcattgagactgcaactgttcctatattcgctgtggatgccggaggctgcatcaatggatggaacgctaagattgcagagttgacaggtctctcagttgaagaagctatggggaagtctctggtttctgatttaatatacaaagagaatgaagcaactgtcaataagcttctttctcgtgctttgagaggggacgaggaaaagaatgtggaggttaagctgaaaactttcagccccgaactacaagggaaagcagtttttgtggttgtgaatgcttgttccagcaaggactacttgaacaacattgtcggcgtttgttttgttggacaagacgttactagtcagaaaatcgtaatggataagttcatcaacatacaaggagattacaaggctattgtacatagcccaaaccctctaatcccgccaatttttgctgctgacgagaacacgtgctgcctggaatggaacatggcgatggaaaagcttacgggttggtctcgcagtgaagtgattgggaaaatgattgtcggggaagtgtttgggagctgttgcatgctaaagggtcctgatgctttaaccaagttcatgattgtattgcataatgcgattggtggccaagatacggataagttccctttcccattctttgaccgcaatgggaagtttgttcaggctctattgactgcaaacaagcgggttagcctcgagggaaaggttattggggctttctgtttcttgcaaatcccgagccctgagctgcagcaagctttagcagtccaacggaggcaggacacagagtgtttcacgaaggcaaaagagttggcttatatttgtcaggtgataaagaatcctttgagcggtatgcgtttcgcaaactcattgttggaggccacagacttgaacgaggaccagaagcagttacttgaaacaagtgtttcttgcgagaaacagatctcaaggatcgtcggggacatggatcttgaaagcattgaagacggttcatttgtgctaaagagggaagagtttttccttggaagtgtcataaacgcgattgtaagtcaagcgatgttcttattaagggacagaggtcttcagctgatccgtgacattcccgaagagatcaaatcaatagaggtttttggagaccagataaggattcaacagctcctggctgagtttctgctgagtataatccggtatgcaccatctcaagagtgggtggagatccatttaagccaactttcaaagcaaatggctgatggattcgccgccatccgcacagaattcagaatggcgtgtccaggtgaaggtctgcctccagagctagtccgagacatgttccatagcagcaggtggacaagccctgaaggtttaggtctaagcgtatgtcgaaagattttaaagctaatgaacggtgaggttcaatacatccgagaatcagaacggtcctatttcctcatcattctggaactccctgtacctcgaaagcgaccattgtcaactgctagtggaagtggtgacatgatgctgatgatgccatattagatggtttccggagtcgggggtagtggcggtggccgtggcggtggccgtggcggagaagaagaaccgtcgtcaagtcacactcctaataaccgaagaggaggagaacaagctcaatcgtcgggaacgaaatctctcagaccaagaagcaacactgaatcaatgagcaaagcaattcaacagtacaccgtcgacgcaagactccacgccgttttcgaacaatccggcgaatcagggaaatcattcgactactcacaatcactcaaaacgacgacgtacggttcctctgtacctgagcaacagatcacagcttatctctctcgaatccagcgaggtggttacattcagcctttcggatgtatgatcgccgtcgatgaatccagtttccggatcatcggttacagtgaaaacgccagagaaatgttagggattatgcctcaatctgttcctactcttgagaaacctgagattctagctatgggaactgatgtgagatctttgttcacttcttcgagctcgattctactcgagcgtgctttcgttgctcgagagattaccttgttaaatccggtttggatccattccaagaatactggtaaaccgttttacgccattcttcataggattgatgttggtgttgttattgatttagagccagctagaactgaagatcctgcgctttctattgctggtgctgttcaatcgcagaaactcgcggttcgtgcgatttctcagttacaggctcttcctggtggagatattaagcttttgtgtgacactgtcgtggaaagtgtgagggacttgactggttatgatcgtgttatggtttataagtttcatgaagatgagcatggagaagttgtagctgagagtaaacgagatgatttagagccttatattggactgcatgttcctgctactgatattcctcaagcgtcaaggttcttgtttaagcagaaccgtgtccgaatgatagtagattgcaatgccacacctgttcttgtggtccaggacgataggctaactcagtctatgtgcttggttggttctactcttagggctcctcatggttgtcactctcagtatatggctaacatgggatctattgcgtctttagcaatggcggttataatcaatggaaatgaagatgatgggagcaatgtagctagtggaagaagctcgatgaggctttggggtttggttgtttgccatcacacttcttctcgctgcataccgtttccgctaaggtatgcttgtgagtttttgatgcaggctttcggtttacagttaaacatggaattgcagttagctttgcaaatgtcagagaaacgcgttttgagaacgcagacactgttatgtgatatgcttctgcgtgactcgcctgctggaattgttacacagagtcccagtatcatggacttagtgaaatgtgacggtgcagcatttctttaccacgggaagtattacccgttgggtgttgctcctagtgaagttcagataaaagatgttgtggagtggttgcttgcgaatcatgcggattcaaccggattaagcactgatagtttaggcgatgcggggtatcccggtgcagctgcgttaggggatgctgtgtgcggtatggcagttgcatatatcacaaaaagagactttcttttttggtttcgatctcacactgcgaaagaaatcaaatggggaggcgctaagcatcatccggaggataaagatgatgggcaacgaatgcatcctcgttcgtcctttcaggcttttcttgaagttgttaagagccggagtcagccatgggaaactgcggaaatggatgcgattcactcgctccagcttattctgagagactcttttaaagaatctgaggcggctatgaactctaaagttgtggatggtgtggttcagccatgtagggatatggcgggggaacaggggattgatgagttaggtgcagttgcaagagagatggttaggctcattgagactgcaactgttcctatattcgctgtggatgccggaggctgcatcaatggatggaacgctaagattgcagagttgacaggtctctcagttgaagaagctatggggaagtctctggtttctgatttaatatacaaagagaatgaagcaactgtcaataagcttctttctcgtgctttgagaggggacgaggaaaagaatgtggaggttaagctgaaaactttcagccccgaactacaagggaaagcagtttttgtggttgtgaatgcttgttccagcaaggactacttgaacaacattgtcggcgtttgttttgttggacaagacgttactagtcagaaaatcgtaatggataagttcatcaacatacaaggagattacaaggctattgtacatagcccaaaccctctaatcccgccaatttttgctgctgacgagaacacgtgctgcctggaatggaacatggcgatggaaaagcttacgggttggtctcgcagtgaagtgattgggaaaatgattgtcggggaagtgtttgggagctgttgcatgctaaagggtcctgatgctttaaccaagttcatgattgtattgcataatgcgattggtggccaagatacggataagttccctttcccattctttgaccgcaatgggaagtttgttcaggctctattgactgcaaacaagcgggttagcctcgagggaaaggttattggggctttctgtttcttgcaaatcccgagccctgagctgcagcaagctttagcagtccaacggaggcaggacacagagtgtttcacgaaggcaaaagagttggcttatatttgtcaggtgataaagaatcctttgagcggtatgcgtttcgcaaactcattgttggaggccacagacttgaacgaggaccagaagcagttacttgaaacaagtgtttcttgcgagaaacagatctcaaggatcgtcggggacatggatcttgaaagcattgaagacggttcatttgtgctaaagagggaagagtttttccttggaagtgtcataaacgcgattgtaagtcaagcgatgttcttattaagggacagaggtcttcagctgatccgtgacattcccgaagagatcaaatcaatagaggtttttggagaccagataaggattcaacagctcctggctgagtttctgctgagtataatccggtatgcaccatctcaagagtgggtggagatccatttaagccaactttcaaagcaaatggctgatggattcgccgccatccgcacagaattcagaatggcgtgtccaggtgaaggtctgcctccagagctagtccgagacatgttccatagcagcaggtggacaagccctgaaggtttaggtctaagcgtatgtcgaaagattttaaagctaatgaacggtgaggttcaatacatccgagaatcagaacggtcctatttcctcatcattctggaactccctgtacctcgaaagcgaccattgtcaactgctagtggaagtggtgacatgatgctgatgatgccatattagatggtttccggagtcgggggtagtggcggtggccgtggcggtggccgtggcggagaagaagaaccgtcgtcaagtcacactcctaataaccgaagaggaggagaacaagctcaatcgtcgggaacgaaatctctcagaccaagaagcaacactgaatcaatgagcaaagcaattcaacagtacaccgtcgacgcaagactccacgccgttttcgaacaatccggcgaatcagggaaatcattcgactactcacaatcactcaaaacgacgacgtacggttcctctgtacctgagcaacagatcacagcttatctctctcgaatccagcgaggtggttacattcagcctttcggatgtatgatcgccgtcgatgaatccagtttccggatcatcggttacagtgaaaacgccagagaaatgttagggattatgcctcaatctgttcctactcttgagaaacctgagattctagctatgggaactgatgtgagatctttgttcacttcttcgagctcgattctactcgagcgtgctttcgttgctcgagagattaccttgttaaatccggtttggatccattccaagaatactggtaaaccgttttacgccattcttcataggattgatgttggtgttgttattgatttagagccagctagaactgaagatcctgcgctttctattgctggtgctgttcaatcgcagaaactcgcggttcgtgcgatttctcagttacaggctcttcctggtggagatattaagcttttgtgtgacactgtcgtggaaagtgtgagggacttgactggttatgatcgtgttatggtttataagtttcatgaagatgagcatggagaagttgtagctgagagtaaacgagatgatttagagccttatattggactgcatgttcctgctactgatattcctcaagcgtcaaggttcttgtttaagcagaaccgtgtccgaatgatagtagattgcaatgccacacctgttcttgtggtccaggacgataggctaactcagtctatgtgcttggttggttctactcttagggctcctcatggttgtcactctcagtatatggctaacatgggatctattgcgtctttagcaatggcggttataatcaatggaaatgaagatgatgggagcaatgtagctagtggaagaagctcgatgaggctttggggtttggttgtttgccatcacacttcttctcgctgcataccgtttccgctaaggtatgcttgtgagtttttgatgcaggctttcggtttacagttaaacatggaattgcagttagctttgcaaatgtcagagaaacgcgttttgagaacgcagacactgttatgtgatatgcttctgcgtgactcgcctgctggaattgttacacagagtcccagtatcatggacttagtgaaatgtgacggtgcagcatttctttaccacgggaagtattacccgttgggtgttgctcctagtgaagttcagataaaagatgttgtggagtggttgcttgcgaatcatgcggattcaaccggattaagcactgatagtttaggcgatgcggggtatcccggtgcagctgcgttaggggatgctgtgtgcggtatggcagttgcatatatcacaaaaagagactttcttttttggtttcgatctcacactgcgaaagaaatcaaatggggaggcgctaagcatcatccggaggataaagatgatgggcaacgaatgcatcctcgttcgtcctttcaggcttttcttgaagttgttaagagccggagtcagccatgggaaactgcggaaatggatgcgattcactcgctccagcttattctgagagactcttttaaagaatctgaggcggctatgaactctaaagttgtggatggtgtggttcagccatgtagggatatggcgggggaacaggggattgatgagttaggtgcagttgcaagagagatggttaggctcattgagactgcaactgttcctatattcgctgtggatgccggaggctgcatcaatggatggaacgctaagattgcagagttgacaggtctctcagttgaagaagctatggggaagtctctggtttctgatttaatatacaaagagaatgaagcaactgtcaataagcttctttctcgtgctttgagaggggacgaggaaaagaatgtggaggttaagctgaaaactttcagccccgaactacaagggaaagcagtttttgtggttgtgaatgcttgttccagcaaggactacttgaacaacattgtcggcgtttgttttgttggacaagacgttactagtcagaaaatcgtaatggataagttcatcaacatacaaggagattacaaggctattgtacatagcccaaaccctctaatcccgccaatttttgctgctgacgagaacacgtgctgcctggaatggaacatggcgatggaaaagcttacgggttggtctcgcagtgaagtgattgggaaaatgattgtcggggaagtgtttgggagctgttgcatgctaaagggtcctgatgctttaaccaagttcatgattgtattgcataatgcgattggtggccaagatacggataagttccctttcccattctttgaccgcaatgggaagtttgttcaggctctattgactgcaaacaagcgggttagcctcgagggaaaggttattggggctttctgtttcttgcaaatcccgagccctgagctgcagcaagctttagcagtccaacggaggcaggacacagagtgtttcacgaaggcaaaagagttggcttatatttgtcaggtgataaagaatcctttgagcggtatgcgtttcgcaaactcattgttggaggccacagacttgaacgaggaccagaagcagttacttgaaacaagtgtttcttgcgagaaacagatctcaaggatcgtcggggacatggatcttgaaagcattgaagacggttcatttgtgctaaagagggaagagtttttccttggaagtgtcataaacgcgattgtaagtcaagcgatgttcttattaagggacagaggtcttcagctgatccgtgacattcccgaagagatcaaatcaatagaggtttttggagaccagataaggattcaacagctcctggctgagtttctgctgagtataatccggtatgcaccatctcaagagtgggtggagatccatttaagccaactttcaaagcaaatggctgatggattcgccgccatccgcacagaattcagaatggcgtgtccaggtgaaggtctgcctccagagctagtccgagacatgttccatagcagcaggtggacaagccctgaaggtttaggtctaagcgtatgtcgaaagattttaaagctaatgaacggtgaggttcaatacatccgagaatcagaacggtcctatttcctcatcattctggaactccctgtacctcgaaagcgaccattgtcaactgctagtggaagtggtgacatgatgctgatgatgccatattagatggtttccggagtcgggggtagtggcggtggccgtggcggtggccgtggcggagaagaagaaccgtcgtcaagtcacactcctaataaccgaagaggaggagaacaagctcaatcgtcgggaacgaaatctctcagaccaagaagcaacactgaatcaatgagcaaagcaattcaacagtacaccgtcgacgcaagactccacgccgttttcgaacaatccggcgaatcagggaaatcattcgactactcacaatcactcaaaacgacgacgtacggttcctctgtacctgagcaacagatcacagcttatctctctcgaatccagcgaggtggttacattcagcctttcggatgtatgatcgccgtcgatgaatccagtttccggatcatcggttacagtgaaaacgccagagaaatgttagggattatgcctcaatctgttcctactcttgagaaacctgagattctagctatgggaactgatgtgagatctttgttcacttcttcgagctcgattctactcgagcgtgctttcgttgctcgagagattaccttgttaaatccggtttggatccattccaagaatactggtaaaccgttttacgccattcttcataggattgatgttggtgttgttattgatttagagccagctagaactgaagatcctgcgctttctattgctggtgctgttcaatcgcagaaactcgcggttcgtgcgatttctcagttacaggctcttcctggtggagatattaagcttttgtgtgacactgtcgtggaaagtgtgagggacttgactggttatgatcgtgttatggtttataagtttcatgaagatgagcatggagaagttgtagctgagagtaaacgagatgatttagagccttatattggactgcatgttcctgctactgatattcctcaagcgtcaaggttcttgtttaagcagaaccgtgtccgaatgatagtagattgcaatgccacacctgttcttgtggtccaggacgataggctaactcagtctatgtgcttggttggttctactcttagggctcctcatggttgtcactctcagtatatggctaacatgggatctattgcgtctttagcaatggcggttataatcaatggaaatgaagatgatgggagcaatgtagctagtggaagaagctcgatgaggctttggggtttggttgtttgccatcacacttcttctcgctgcataccgtttccgctaaggtatgcttgtgagtttttgatgcaggctttcggtttacagttaaacatggaattgcagttagctttgcaaatgtcagagaaacgcgttttgagaacgcagacactgttatgtgatatgcttctgcgtgactcgcctgctggaattgttacacagagtcccagtatcatggacttagtgaaatgtgacggtgcagcatttctttaccacgggaagtattacccgttgggtgttgctcctagtgaagttcagataaaagatgttgtggagtggttgcttgcgaatcatgcggattcaaccggattaagcactgatagtttaggcgatgcggggtatcccggtgcagctgcgttaggggatgctgtgtgcggtatggcagttgcatatatcacaaaaagagactttcttttttggtttcgatctcacactgcgaaagaaatcaaatggggaggcgctaagcatcatccggaggataaagatgatgggcaacgaatgcatcctcgttcgtcctttcaggcttttcttgaagttgttaagagccggagtcagccatgggaaactgcggaaatggatgcgattcactcgctccagcttattctgagagactcttttaaagaatctgaggcggctatgaactctaaagttgtggatggtgtggttcagccatgtagggatatggcgggggaacaggggattgatgagttaggtgcagttgcaagagagatggttaggctcattgagactgcaactgttcctatattcgctgtggatgccggaggctgcatcaatggatggaacgctaagattgcagagttgacaggtctctcagttgaagaagctatggggaagtctctggtttctgatttaatatacaaagagaatgaagcaactgtcaataagcttctttctcgtgctttgagaggggacgaggaaaagaatgtggaggttaagctgaaaactttcagccccgaactacaagggaaagcagtttttgtggttgtgaatgcttgttccagcaaggactacttgaacaacattgtcggcgtttgttttgttggacaagacgttactagtcagaaaatcgtaatggataagttcatcaacatacaaggagattacaaggctattgtacatagcccaaaccctctaatcccgccaatttttgctgctgacgagaacacgtgctgcctggaatggaacatggcgatggaaaagcttacgggttggtctcgcagtgaagtgattgggaaaatgattgtcggggaagtgtttgggagctgttgcatgctaaagggtcctgatgctttaaccaagttcatgattgtattgcataatgcgattggtggccaagatacggataagttccctttcccattctttgaccgcaatgggaagtttgttcaggctctattgactgcaaacaagcgggttagcctcgagggaaaggttattggggctttctgtttcttgcaaatcccgagccctgagctgcagcaagctttagcagtccaacggaggcaggacacagagtgtttcacgaaggcaaaagagttggcttatatttgtcaggtgataaagaatcctttgagcggtatgcgtttcgcaaactcattgttggaggccacagacttgaacgaggaccagaagcagttacttgaaacaagtgtttcttgcgagaaacagatctcaaggatcgtcggggacatggatcttgaaagcattgaagacggttcatttgtgctaaagagggaagagtttttccttggaagtgtcataaacgcgattgtaagtcaagcgatgttcttattaagggacagaggtcttcagctgatccgtgacattcccgaagagatcaaatcaatagaggtttttggagaccagataaggattcaacagctcctggctgagtttctgctgagtataatccggtatgcaccatctcaagagtgggtggagatccatttaagccaactttcaaagcaaatggctgatggattcgccgccatccgcacagaattcagaatggcgtgtccaggtgaaggtctgcctccagagctagtccgagacatgttccatagcagcaggtggacaagccctgaaggtttaggtctaagcgtatgtcgaaagattttaaagctaatgaacggtgaggttcaatacatccgagaatcagaacggtcctatttcctcatcattctggaactccctgtacctcgaaagcgaccattgtcaactgctagtggaagtggtgacatgatgctgatgatgccatattagatggtttccggagtcgggggtagtggcggtggccgtggcggtggccgtggcggagaagaagaaccgtcgtcaagtcacactcctaataaccgaagaggaggagaacaagctcaatcgtcgggaacgaaatctctcagaccaagaagcaacactgaatcaatgagcaaagcaattcaacagtacaccgtcgacgcaagactccacgccgttttcgaacaatccggcgaatcagggaaatcattcgactactcacaatcactcaaaacgacgacgtacggttcctctgtacctgagcaacagatcacagcttatctctctcgaatccagcgaggtggttacattcagcctttcggatgtatgatcgccgtcgatgaatccagtttccggatcatcggttacagtgaaaacgccagagaaatgttagggattatgcctcaatctgttcctactcttgagaaacctgagattctagctatgggaactgatgtgagatctttgttcacttcttcgagctcgattctactcgagcgtgctttcgttgctcgagagattaccttgttaaatccggtttggatccattccaagaatactggtaaaccgttttacgccattcttcataggattgatgttggtgttgttattgatttagagccagctagaactgaagatcctgcgctttctattgctggtgctgttcaatcgcagaaactcgcggttcgtgcgatttctcagttacaggctcttcctggtggagatattaagcttttgtgtgacactgtcgtggaaagtgtgagggacttgactggttatgatcgtgttatggtttataagtttcatgaagatgagcatggagaagttgtagctgagagtaaacgagatgatttagagccttatattggactgcatgttcctgctactgatattcctcaagcgtcaaggttcttgtttaagcagaaccgtgtccgaatgatagtagattgcaatgccacacctgttcttgtggtccaggacgataggctaactcagtctatgtgcttggttggttctactcttagggctcctcatggttgtcactctcagtatatggctaacatgggatctattgcgtctttagcaatggcggttataatcaatggaaatgaagatgatgggagcaatgtagctagtggaagaagctcgatgaggctttggggtttggttgtttgccatcacacttcttctcgctgcataccgtttccgctaaggtatgcttgtgagtttttgatgcaggctttcggtttacagttaaacatggaattgcagttagctttgcaaatgtcagagaaacgcgttttgagaacgcagacactgttatgtgatatgcttctgcgtgactcgcctgctggaattgttacacagagtcccagtatcatggacttagtgaaatgtgacggtgcagcatttctttaccacgggaagtattacccgttgggtgttgctcctagtgaagttcagataaaagatgttgtggagtggttgcttgcgaatcatgcggattcaaccggattaagcactgatagtttaggcgatgcggggtatcccggtgcagctgcgttaggggatgctgtgtgcggtatggcagttgcatatatcacaaaaagagactttcttttttggtttcgatctcacactgcgaaagaaatcaaatggggaggcgctaagcatcatccggaggataaagatgatgggcaacgaatgcatcctcgttcgtcctttcaggcttttcttgaagttgttaagagccggagtcagccatgggaaactgcggaaatggatgcgattcactcgctccagcttattctgagagactcttttaaagaatctgaggcggctatgaactctaaagttgtggatggtgtggttcagccatgtagggatatggcgggggaacaggggattgatgagttaggtgcagttgcaagagagatggttaggctcattgagactgcaactgttcctatattcgctgtggatgccggaggctgcatcaatggatggaacgctaagattgcagagttgacaggtctctcagttgaagaagctatggggaagtctctggtttctgatttaatatacaaagagaatgaagcaactgtcaataagcttctttctcgtgctttgagaggggacgaggaaaagaatgtggaggttaagctgaaaactttcagccccgaactacaagggaaagcagtttttgtggttgtgaatgcttgttccagcaaggactacttgaacaacattgtcggcgtttgttttgttggacaagacgttactagtcagaaaatcgtaatggataagttcatcaacatacaaggagattacaaggctattgtacatagcccaaaccctctaatcccgccaatttttgctgctgacgagaacacgtgctgcctggaatggaacatggcgatggaaaagcttacgggttggtctcgcagtgaagtgattgggaaaatgattgtcggggaagtgtttgggagctgttgcatgctaaagggtcctgatgctttaaccaagttcatgattgtattgcataatgcgattggtggccaagatacggataagttccctttcccattctttgaccgcaatgggaagtttgttcaggctctattgactgcaaacaagcgggttagcctcgagggaaaggttattggggctttctgtttcttgcaaatcccgagccctgagctgcagcaagctttagcagtccaacggaggcaggacacagagtgtttcacgaaggcaaaagagttggcttatatttgtcaggtgataaagaatcctttgagcggtatgcgtttcgcaaactcattgttggaggccacagacttgaacgaggaccagaagcagttacttgaaacaagtgtttcttgcgagaaacagatctcaaggatcgtcggggacatggatcttgaaagcattgaagacggttcatttgtgctaaagagggaagagtttttccttggaagtgtcataaacgcgattgtaagtcaagcgatgttcttattaagggacagaggtcttcagctgatccgtgacattcccgaagagatcaaatcaatagaggtttttggagaccagataaggattcaacagctcctggctgagtttctgctgagtataatccggtatgcaccatctcaagagtgggtggagatccatttaagccaactttcaaagcaaatggctgatggattcgccgccatccgcacagaattcagaatggcgtgtccaggtgaaggtctgcctccagagctagtccgagacatgttccatagcagcaggtggacaagccctgaaggtttaggtctaagcgtatgtcgaaagattttaaagctaatgaacggtgaggttcaatacatccgagaatcagaacggtcctatttcctcatcattctggaactccctgtacctcgaaagcgaccattgtcaactgctagtggaagtggtgacatgatgctgatgatgccatattagatggtttccggagtcgggggtagtggcggtggccgtggcggtggccgtggcggagaagaagaaccgtcgtcaagtcacactcctaataaccgaagaggaggagaacaagctcaatcgtcgggaacgaaatctctcagaccaagaagcaacactgaatcaatgagcaaagcaattcaacagtacaccgtcgacgcaagactccacgccgttttcgaacaatccggcgaatcagggaaatcattcgactactcacaatcactcaaaacgacgacgtacggttcctctgtacctgagcaacagatcacagcttatctctctcgaatccagcgaggtggttacattcagcctttcggatgtatgatcgccgtcgatgaatccagtttccggatcatcggttacagtgaaaacgccagagaaatgttagggattatgcctcaatctgttcctactcttgagaaacctgagattctagctatgggaactgatgtgagatctttgttcacttcttcgagctcgattctactcgagcgtgctttcgttgctcgagagattaccttgttaaatccggtttggatccattccaagaatactggtaaaccgttttacgccattcttcataggattgatgttggtgttgttattgatttagagccagctagaactgaagatcctgcgctttctattgctggtgctgttcaatcgcagaaactcgcggttcgtgcgatttctcagttacaggctcttcctggtggagatattaagcttttgtgtgacactgtcgtggaaagtgtgagggacttgactggttatgatcgtgttatggtttataagtttcatgaagatgagcatggagaagttgtagctgagagtaaacgagatgatttagagccttatattggactgcatgttcctgctactgatattcctcaagcgtcaaggttcttgtttaagcagaaccgtgtccgaatgatagtagattgcaatgccacacctgttcttgtggtccaggacgataggctaactcagtctatgtgcttggttggttctactcttagggctcctcatggttgtcactctcagtatatggctaacatgggatctattgcgtctttagcaatggcggttataatcaatggaaatgaagatgatgggagcaatgtagctagtggaagaagctcgatgaggctttggggtttggttgtttgccatcacacttcttctcgctgcataccgtttccgctaaggtatgcttgtgagtttttgatgcaggctttcggtttacagttaaacatggaattgcagttagctttgcaaatgtcagagaaacgcgttttgagaacgcagacactgttatgtgatatgcttctgcgtgactcgcctgctggaattgttacacagagtcccagtatcatggacttagtgaaatgtgacggtgcagcatttctttaccacgggaagtattacccgttgggtgttgctcctagtgaagttcagataaaagatgttgtggagtggttgcttgcgaatcatgcggattcaaccggattaagcactgatagtttaggcgatgcggggtatcccggtgcagctgcgttaggggatgctgtgtgcggtatggcagttgcatatatcacaaaaagagactttcttttttggtttcgatctcacactgcgaaagaaatcaaatggggaggcgctaagcatcatccggaggataaagatgatgggcaacgaatgcatcctcgttcgtcctttcaggcttttcttgaagttgttaagagccggagtcagccatgggaaactgcggaaatggatgcgattcactcgctccagcttattctgagagactcttttaaagaatctgaggcggctatgaactctaaagttgtggatggtgtggttcagccatgtagggatatggcgggggaacaggggattgatgagttaggtgcagttgcaagagagatggttaggctcattgagactgcaactgttcctatattcgctgtggatgccggaggctgcatcaatggatggaacgctaagattgcagagttgacaggtctctcagttgaagaagctatggggaagtctctggtttctgatttaatatacaaagagaatgaagcaactgtcaataagcttctttctcgtgctttgagaggggacgaggaaaagaatgtggaggttaagctgaaaactttcagccccgaactacaagggaaagcagtttttgtggttgtgaatgcttgttccagcaaggactacttgaacaacattgtcggcgtttgttttgttggacaagacgttactagtcagaaaatcgtaatggataagttcatcaacatacaaggagattacaaggctattgtacatagcccaaaccctctaatcccgccaatttttgctgctgacgagaacacgtgctgcctggaatggaacatggcgatggaaaagcttacgggttggtctcgcagtgaagtgattgggaaaatgattgtcggggaagtgtttgggagctgttgcatgctaaagggtcctgatgctttaaccaagttcatgattgtattgcataatgcgattggtggccaagatacggataagttccctttcccattctttgaccgcaatgggaagtttgttcaggctctattgactgcaaacaagcgggttagcctcgagggaaaggttattggggctttctgtttcttgcaaatcccgagccctgagctgcagcaagctttagcagtccaacggaggcaggacacagagtgtttcacgaaggcaaaagagttggcttatatttgtcaggtgataaagaatcctttgagcggtatgcgtttcgcaaactcattgttggaggccacagacttgaacgaggaccagaagcagttacttgaaacaagtgtttcttgcgagaaacagatctcaaggatcgtcggggacatggatcttgaaagcattgaagacggttcatttgtgctaaagagggaagagtttttccttggaagtgtcataaacgcgattgtaagtcaagcgatgttcttattaagggacagaggtcttcagctgatccgtgacattcccgaagagatcaaatcaatagaggtttttggagaccagataaggattcaacagctcctggctgagtttctgctgagtataatccggtatgcaccatctcaagagtgggtggagatccatttaagccaactttcaaagcaaatggctgatggattcgccgccatccgcacagaattcagaatggcgtgtccaggtgaaggtctgcctccagagctagtccgagacatgttccatagcagcaggtggacaagccctgaaggtttaggtctaagcgtatgtcgaaagattttaaagctaatgaacggtgaggttcaatacatccgagaatcagaacggtcctatttcctcatcattctggaactccctgtacctcgaaagcgaccattgtcaactgctagtggaagtggtgacatgatgctgatgatgccatattagatggtttccggagtcgggggtagtggcggtggccgtggcggtggccgtggcggagaagaagaaccgtcgtcaagtcacactcctaataaccgaagaggaggagaacaagctcaatcgtcgggaacgaaatctctcagaccaagaagcaacactgaatcaatgagcaaagcaattcaacagtacaccgtcgacgcaagactccacgccgttttcgaacaatccggcgaatcagggaaatcattcgactactcacaatcactcaaaacgacgacgtacggttcctctgtacctgagcaacagatcacagcttatctctctcgaatccagcgaggtggttacattcagcctttcggatgtatgatcgccgtcgatgaatccagtttccggatcatcggttacagtgaaaacgccagagaaatgttagggattatgcctcaatctgttcctactcttgagaaacctgagattctagctatgggaactgatgtgagatctttgttcacttcttcgagctcgattctactcgagcgtgctttcgttgctcgagagattaccttgttaaatccggtttggatccattccaagaatactggtaaaccgttttacgccattcttcataggattgatgttggtgttgttattgatttagagccagctagaactgaagatcctgcgctttctattgctggtgctgttcaatcgcagaaactcgcggttcgtgcgatttctcagttacaggctcttcctggtggagatattaagcttttgtgtgacactgtcgtggaaagtgtgagggacttgactggttatgatcgtgttatggtttataagtttcatgaagatgagcatggagaagttgtagctgagagtaaacgagatgatttagagccttatattggactgcatgttcctgctactgatattcctcaagcgtcaaggttcttgtttaagcagaaccgtgtccgaatgatagtagattgcaatgccacacctgttcttgtggtccaggacgataggctaactcagtctatgtgcttggttggttctactcttagggctcctcatggttgtcactctcagtatatggctaacatgggatctattgcgtctttagcaatggcggttataatcaatggaaatgaagatgatgggagcaatgtagctagtggaagaagctcgatgaggctttggggtttggttgtttgccatcacacttcttctcgctgcataccgtttccgctaaggtatgcttgtgagtttttgatgcaggctttcggtttacagttaaacatggaattgcagttagctttgcaaatgtcagagaaacgcgttttgagaacgcagacactgttatgtgatatgcttctgcgtgactcgcctgctggaattgttacacagagtcccagtatcatggacttagtgaaatgtgacggtgcagcatttctttaccacgggaagtattacccgttgggtgttgctcctagtgaagttcagataaaagatgttgtggagtggttgcttgcgaatcatgcggattcaaccggattaagcactgatagtttaggcgatgcggggtatcccggtgcagctgcgttaggggatgctgtgtgcggtatggcagttgcatatatcacaaaaagagactttcttttttggtttcgatctcacactgcgaaagaaatcaaatggggaggcgctaagcatcatccggaggataaagatgatgggcaacgaatgcatcctcgttcgtcctttcaggcttttcttgaagttgttaagagccggagtcagccatgggaaactgcggaaatggatgcgattcactcgctccagcttattctgagagactcttttaaagaatctgaggcggctatgaactctaaagttgtggatggtgtggttcagccatgtagggatatggcgggggaacaggggattgatgagttaggtgcagttgcaagagagatggttaggctcattgagactgcaactgttcctatattcgctgtggatgccggaggctgcatcaatggatggaacgctaagattgcagagttgacaggtctctcagttgaagaagctatggggaagtctctggtttctgatttaatatacaaagagaatgaagcaactgtcaataagcttctttctcgtgctttgagaggggacgaggaaaagaatgtggaggttaagctgaaaactttcagccccgaactacaagggaaagcagtttttgtggttgtgaatgcttgttccagcaaggactacttgaacaacattgtcggcgtttgttttgttggacaagacgttactagtcagaaaatcgtaatggataagttcatcaacatacaaggagattacaaggctattgtacatagcccaaaccctctaatcccgccaatttttgctgctgacgagaacacgtgctgcctggaatggaacatggcgatggaaaagcttacgggttggtctcgcagtgaagtgattgggaaaatgattgtcggggaagtgtttgggagctgttgcatgctaaagggtcctgatgctttaaccaagttcatgattgtattgcataatgcgattggtggccaagatacggataagttccctttcccattctttgaccgcaatgggaagtttgttcaggctctattgactgcaaacaagcgggttagcctcgagggaaaggttattggggctttctgtttcttgcaaatcccgagccctgagctgcagcaagctttagcagtccaacggaggcaggacacagagtgtttcacgaaggcaaaagagttggcttatatttgtcaggtgataaagaatcctttgagcggtatgcgtttcgcaaactcattgttggaggccacagacttgaacgaggaccagaagcagttacttgaaacaagtgtttcttgcgagaaacagatctcaaggatcgtcggggacatggatcttgaaagcattgaagacggttcatttgtgctaaagagggaagagtttttccttggaagtgtcataaacgcgattgtaagtcaagcgatgttcttattaagggacagaggtcttcagctgatccgtgacattcccgaagagatcaaatcaatagaggtttttggagaccagataaggattcaacagctcctggctgagtttctgctgagtataatccggtatgcaccatctcaagagtgggtggagatccatttaagccaactttcaaagcaaatggctgatggattcgccgccatccgcacagaattcagaatggcgtgtccaggtgaaggtctgcctccagagctagtccgagacatgttccatagcagcaggtggacaagccctgaaggtttaggtctaagcgtatgtcgaaagattttaaagctaatgaacggtgaggttcaatacatccgagaatcagaacggtcctatttcctcatcattctggaactccctgtacctcgaaagcgaccattgtcaactgctagtggaagtggtgacatgatgctgatgatgccatattagatggtttccggagtcgggggtagtggcggtggccgtggcggtggccgtggcggagaagaagaaccgtcgtcaagtcacactcctaataaccgaagaggaggagaacaagctcaatcgtcgggaacgaaatctctcagaccaagaagcaacactgaatcaatgagcaaagcaattcaacagtacaccgtcgacgcaagactccacgccgttttcgaacaatccggcgaatcagggaaatcattcgactactcacaatcactcaaaacgacgacgtacggttcctctgtacctgagcaacagatcacagcttatctctctcgaatccagcgaggtggttacattcagcctttcggatgtatgatcgccgtcgatgaatccagtttccggatcatcggttacagtgaaaacgccagagaaatgttagggattatgcctcaatctgttcctactcttgagaaacctgagattctagctatgggaactgatgtgagatctttgttcacttcttcgagctcgattctactcgagcgtgctttcgttgctcgagagattaccttgttaaatccggtttggatccattccaagaatactggtaaaccgttttacgccattcttcataggattgatgttggtgttgttattgatttagagccagctagaactgaagatcctgcgctttctattgctggtgctgttcaatcgcagaaactcgcggttcgtgcgatttctcagttacaggctcttcctggtggagatattaagcttttgtgtgacactgtcgtggaaagtgtgagggacttgactggttatgatcgtgttatggtttataagtttcatgaagatgagcatggagaagttgtagctgagagtaaacgagatgatttagagccttatattggactgcatgttcctgctactgatattcctcaagcgtcaaggttcttgtttaagcagaaccgtgtccgaatgatagtagattgcaatgccacacctgttcttgtggtccaggacgataggctaactcagtctatgtgcttggttggttctactcttagggctcctcatggttgtcactctcagtatatggctaacatgggatctattgcgtctttagcaatggcggttataatcaatggaaatgaagatgatgggagcaatgtagctagtggaagaagctcgatgaggctttggggtttggttgtttgccatcacacttcttctcgctgcataccgtttccgctaaggtatgcttgtgagtttttgatgcaggctttcggtttacagttaaacatggaattgcagttagctttgcaaatgtcagagaaacgcgttttgagaacgcagacactgttatgtgatatgcttctgcgtgactcgcctgctggaattgttacacagagtcccagtatcatggacttagtgaaatgtgacggtgcagcatttctttaccacgggaagtattacccgttgggtgttgctcctagtgaagttcagataaaagatgttgtggagtggttgcttgcgaatcatgcggattcaaccggattaagcactgatagtttaggcgatgcggggtatcccggtgcagctgcgttaggggatgctgtgtgcggtatggcagttgcatatatcacaaaaagagactttcttttttggtttcgatctcacactgcgaaagaaatcaaatggggaggcgctaagcatcatccggaggataaagatgatgggcaacgaatgcatcctcgttcgtcctttcaggcttttcttgaagttgttaagagccggagtcagccatgggaaactgcggaaatggatgcgattcactcgctccagcttattctgagagactcttttaaagaatctgaggcggctatgaactctaaagttgtggatggtgtggttcagccatgtagggatatggcgggggaacaggggattgatgagttaggtgcagttgcaagagagatggttaggctcattgagactgcaactgttcctatattcgctgtggatgccggaggctgcatcaatggatggaacgctaagattgcagagttgacaggtctctcagttgaagaagctatggggaagtctctggtttctgatttaatatacaaagagaatgaagcaactgtcaataagcttctttctcgtgctttgagaggggacgaggaaaagaatgtggaggttaagctgaaaactttcagccccgaactacaagggaaagcagtttttgtggttgtgaatgcttgttccagcaaggactacttgaacaacattgtcggcgtttgttttgttggacaagacgttactagtcagaaaatcgtaatggataagttcatcaacatacaaggagattacaaggctattgtacatagcccaaaccctctaatcccgccaatttttgctgctgacgagaacacgtgctgcctggaatggaacatggcgatggaaaagcttacgggttggtctcgcagtgaagtgattgggaaaatgattgtcggggaagtgtttgggagctgttgcatgctaaagggtcctgatgctttaaccaagttcatgattgtattgcataatgcgattggtggccaagatacggataagttccctttcccattctttgaccgcaatgggaagtttgttcaggctctattgactgcaaacaagcgggttagcctcgagggaaaggttattggggctttctgtttcttgcaaatcccgagccctgagctgcagcaagctttagcagtccaacggaggcaggacacagagtgtttcacgaaggcaaaagagttggcttatatttgtcaggtgataaagaatcctttgagcggtatgcgtttcgcaaactcattgttggaggccacagacttgaacgaggaccagaagcagttacttgaaacaagtgtttcttgcgagaaacagatctcaaggatcgtcggggacatggatcttgaaagcattgaagacggttcatttgtgctaaagagggaagagtttttccttggaagtgtcataaacgcgattgtaagtcaagcgatgttcttattaagggacagaggtcttcagctgatccgtgacattcccgaagagatcaaatcaatagaggtttttggagaccagataaggattcaacagctcctggctgagtttctgctgagtataatccggtatgcaccatctcaagagtgggtggagatccatttaagccaactttcaaagcaaatggctgatggattcgccgccatccgcacagaattcagaatggcgtgtccaggtgaaggtctgcctccagagctagtccgagacatgttccatagcagcaggtggacaagccctgaaggtttaggtctaagcgtatgtcgaaagattttaaagctaatgaacggtgaggttcaatacatccgagaatcagaacggtcctatttcctcatcattctggaactccctgtacctcgaaagcgaccattgtcaactgctagtggaagtggtgacatgatgctgatgatgccatattagatggtttccggagtcgggggtagtggcggtggccgtggcggtggccgtggcggagaagaagaaccgtcgtcaagtcacactcctaataaccgaagaggaggagaacaagctcaatcgtcgggaacgaaatctctcagaccaagaagcaacactgaatcaatgagcaaagcaattcaacagtacaccgtcgacgcaagactccacgccgttttcgaacaatccggcgaatcagggaaatcattcgactactcacaatcactcaaaacgacgacgtacggttcctctgtacctgagcaacagatcacagcttatctctctcgaatccagcgaggtggttacattcagcctttcggatgtatgatcgccgtcgatgaatccagtttccggatcatcggttacagtgaaaacgccagagaaatgttagggattatgcctcaatctgttcctactcttgagaaacctgagattctagctatgggaactgatgtgagatctttgttcacttcttcgagctcgattctactcgagcgtgctttcgttgctcgagagattaccttgttaaatccggtttggatccattccaagaatactggtaaaccgttttacgccattcttcataggattgatgttggtgttgttattgatttagagccagctagaactgaagatcctgcgctttctattgctggtgctgttcaatcgcagaaactcgcggttcgtgcgatttctcagttacaggctcttcctggtggagatattaagcttttgtgtgacactgtcgtggaaagtgtgagggacttgactggttatgatcgtgttatggtttataagtttcatgaagatgagcatggagaagttgtagctgagagtaaacgagatgatttagagccttatattggactgcatgttcctgctactgatattcctcaagcgtcaaggttcttgtttaagcagaaccgtgtccgaatgatagtagattgcaatgccacacctgttcttgtggtccaggacgataggctaactcagtctatgtgcttggttggttctactcttagggctcctcatggttgtcactctcagtatatggctaacatgggatctattgcgtctttagcaatggcggttataatcaatggaaatgaagatgatgggagcaatgtagctagtggaagaagctcgatgaggctttggggtttggttgtttgccatcacacttcttctcgctgcataccgtttccgctaaggtatgcttgtgagtttttgatgcaggctttcggtttacagttaaacatggaattgcagttagctttgcaaatgtcagagaaacgcgttttgagaacgcagacactgttatgtgatatgcttctgcgtgactcgcctgctggaattgttacacagagtcccagtatcatggacttagtgaaatgtgacggtgcagcatttctttaccacgggaagtattacccgttgggtgttgctcctagtgaagttcagataaaagatgttgtggagtggttgcttgcgaatcatgcggattcaaccggattaagcactgatagtttaggcgatgcggggtatcccggtgcagctgcgttaggggatgctgtgtgcggtatggcagttgcatatatcacaaaaagagactttcttttttggtttcgatctcacactgcgaaagaaatcaaatggggaggcgctaagcatcatccggaggataaagatgatgggcaacgaatgcatcctcgttcgtcctttcaggcttttcttgaagttgttaagagccggagtcagccatgggaaactgcggaaatggatgcgattcactcgctccagcttattctgagagactcttttaaagaatctgaggcggctatgaactctaaagttgtggatggtgtggttcagccatgtagggatatggcgggggaacaggggattgatgagttaggtgcagttgcaagagagatggttaggctcattgagactgcaactgttcctatattcgctgtggatgccggaggctgcatcaatggatggaacgctaagattgcagagttgacaggtctctcagttgaagaagctatggggaagtctctggtttctgatttaatatacaaagagaatgaagcaactgtcaataagcttctttctcgtgctttgagaggggacgaggaaaagaatgtggaggttaagctgaaaactttcagccccgaactacaagggaaagcagtttttgtggttgtgaatgcttgttccagcaaggactacttgaacaacattgtcggcgtttgttttgttggacaagacgttactagtcagaaaatcgtaatggataagttcatcaacatacaaggagattacaaggctattgtacatagcccaaaccctctaatcccgccaatttttgctgctgacgagaacacgtgctgcctggaatggaacatggcgatggaaaagcttacgggttggtctcgcagtgaagtgattgggaaaatgattgtcggggaagtgtttgggagctgttgcatgctaaagggtcctgatgctttaaccaagttcatgattgtattgcataatgcgattggtggccaagatacggataagttccctttcccattctttgaccgcaatgggaagtttgttcaggctctattgactgcaaacaagcgggttagcctcgagggaaaggttattggggctttctgtttcttgcaaatcccgagccctgagctgcagcaagctttagcagtccaacggaggcaggacacagagtgtttcacgaaggcaaaagagttggcttatatttgtcaggtgataaagaatcctttgagcggtatgcgtttcgcaaactcattgttggaggccacagacttgaacgaggaccagaagcagttacttgaaacaagtgtttcttgcgagaaacagatctcaaggatcgtcggggacatggatcttgaaagcattgaagacggttcatttgtgctaaagagggaagagtttttccttggaagtgtcataaacgcgattgtaagtcaagcgatgttcttattaagggacagaggtcttcagctgatccgtgacattcccgaagagatcaaatcaatagaggtttttggagaccagataaggattcaacagctcctggctgagtttctgctgagtataatccggtatgcaccatctcaagagtgggtggagatccatttaagccaactttcaaagcaaatggctgatggattcgccgccatccgcacagaattcagaatggcgtgtccaggtgaaggtctgcctccagagctagtccgagacatgttccatagcagcaggtggacaagccctgaaggtttaggtctaagcgtatgtcgaaagattttaaagctaatgaacggtgaggttcaatacatccgagaatcagaacggtcctatttcctcatcattctggaactccctgtacctcgaaagcgaccattgtcaactgctagtggaagtggtgacatgatgctgatgatgccatattagatggtttccggagtcgggggtagtggcggtggccgtggcggtggccgtggcggagaagaagaaccgtcgtcaagtcacactcctaataaccgaagaggaggagaacaagctcaatcgtcgggaacgaaatctctcagaccaagaagcaacactgaatcaatgagcaaagcaattcaacagtacaccgtcgacgcaagactccacgccgttttcgaacaatccggcgaatcagggaaatcattcgactactcacaatcactcaaaacgacgacgtacggttcctctgtacctgagcaacagatcacagcttatctctctcgaatccagcgaggtggttacattcagcctttcggatgtatgatcgccgtcgatgaatccagtttccggatcatcggttacagtgaaaacgccagagaaatgttagggattatgcctcaatctgttcctactcttgagaaacctgagattctagctatgggaactgatgtgagatctttgttcacttcttcgagctcgattctactcgagcgtgctttcgttgctcgagagattaccttgttaaatccggtttggatccattccaagaatactggtaaaccgttttacgccattcttcataggattgatgttggtgttgttattgatttagagccagctagaactgaagatcctgcgctttctattgctggtgctgttcaatcgcagaaactcgcggttcgtgcgatttctcagttacaggctcttcctggtggagatattaagcttttgtgtgacactgtcgtggaaagtgtgagggacttgactggttatgatcgtgttatggtttataagtttcatgaagatgagcatggagaagttgtagctgagagtaaacgagatgatttagagccttatattggactgcatgttcctgctactgatattcctcaagcgtcaaggttcttgtttaagcagaaccgtgtccgaatgatagtagattgcaatgccacacctgttcttgtggtccaggacgataggctaactcagtctatgtgcttggttggttctactcttagggctcctcatggttgtcactctcagtatatggctaacatgggatctattgcgtctttagcaatggcggttataatcaatggaaatgaagatgatgggagcaatgtagctagtggaagaagctcgatgaggctttggggtttggttgtttgccatcacacttcttctcgctgcataccgtttccgctaaggtatgcttgtgagtttttgatgcaggctttcggtttacagttaaacatggaattgcagttagctttgcaaatgtcagagaaacgcgttttgagaacgcagacactgttatgtgatatgcttctgcgtgactcgcctgctggaattgttacacagagtcccagtatcatggacttagtgaaatgtgacggtgcagcatttctttaccacgggaagtattacccgttgggtgttgctcctagtgaagttcagataaaagatgttgtggagtggttgcttgcgaatcatgcggattcaaccggattaagcactgatagtttaggcgatgcggggtatcccggtgcagctgcgttaggggatgctgtgtgcggtatggcagttgcatatatcacaaaaagagactttcttttttggtttcgatctcacactgcgaaagaaatcaaatggggaggcgctaagcatcatccggaggataaagatgatgggcaacgaatgcatcctcgttcgtcctttcaggcttttcttgaagttgttaagagccggagtcagccatgggaaactgcggaaatggatgcgattcactcgctccagcttattctgagagactcttttaaagaatctgaggcggctatgaactctaaagttgtggatggtgtggttcagccatgtagggatatggcgggggaacaggggattgatgagttaggtgcagttgcaagagagatggttaggctcattgagactgcaactgttcctatattcgctgtggatgccggaggctgcatcaatggatggaacgctaagattgcagagttgacaggtctctcagttgaagaagctatggggaagtctctggtttctgatttaatatacaaagagaatgaagcaactgtcaataagcttctttctcgtgctttgagaggggacgaggaaaagaatgtggaggttaagctgaaaactttcagccccgaactacaagggaaagcagtttttgtggttgtgaatgcttgttccagcaaggactacttgaacaacattgtcggcgtttgttttgttggacaagacgttactagtcagaaaatcgtaatggataagttcatcaacatacaaggagattacaaggctattgtacatagcccaaaccctctaatcccgccaatttttgctgctgacgagaacacgtgctgcctggaatggaacatggcgatggaaaagcttacgggttggtctcgcagtgaagtgattgggaaaatgattgtcggggaagtgtttgggagctgttgcatgctaaagggtcctgatgctttaaccaagttcatgattgtattgcataatgcgattggtggccaagatacggataagttccctttcccattctttgaccgcaatgggaagtttgttcaggctctattgactgcaaacaagcgggttagcctcgagggaaaggttattggggctttctgtttcttgcaaatcccgagccctgagctgcagcaagctttagcagtccaacggaggcaggacacagagtgtttcacgaaggcaaaagagttggcttatatttgtcaggtgataaagaatcctttgagcggtatgcgtttcgcaaactcattgttggaggccacagacttgaacgaggaccagaagcagttacttgaaacaagtgtttcttgcgagaaacagatctcaaggatcgtcggggacatggatcttgaaagcattgaagacggttcatttgtgctaaagagggaagagtttttccttggaagtgtcataaacgcgattgtaagtcaagcgatgttcttattaagggacagaggtcttcagctgatccgtgacattcccgaagagatcaaatcaatagaggtttttggagaccagataaggattcaacagctcctggctgagtttctgctgagtataatccggtatgcaccatctcaagagtgggtggagatccatttaagccaactttcaaagcaaatggctgatggattcgccgccatccgcacagaattcagaatggcgtgtccaggtgaaggtctgcctccagagctagtccgagacatgttccatagcagcaggtggacaagccctgaaggtttaggtctaagcgtatgtcgaaagattttaaagctaatgaacggtgaggttcaatacatccgagaatcagaacggtcctatttcctcatcattctggaactccctgtacctcgaaagcgaccattgtcaactgctagtggaagtggtgacatgatgctgatgatgccatattagatggtttccggagtcgggggtagtggcggtggccgtggcggtggccgtggcggagaagaagaaccgtcgtcaagtcacactcctaataaccgaagaggaggagaacaagctcaatcgtcgggaacgaaatctctcagaccaagaagcaacactgaatcaatgagcaaagcaattcaacagtacaccgtcgacgcaagactccacgccgttttcgaacaatccggcgaatcagggaaatcattcgactactcacaatcactcaaaacgacgacgtacggttcctctgtacctgagcaacagatcacagcttatctctctcgaatccagcgaggtggttacattcagcctttcggatgtatgatcgccgtcgatgaatccagtttccggatcatcggttacagtgaaaacgccagagaaatgttagggattatgcctcaatctgttcctactcttgagaaacctgagattctagctatgggaactgatgtgagatctttgttcacttcttcgagctcgattctactcgagcgtgctttcgttgctcgagagattaccttgttaaatccggtttggatccattccaagaatactggtaaaccgttttacgccattcttcataggattgatgttggtgttgttattgatttagagccagctagaactgaagatcctgcgctttctattgctggtgctgttcaatcgcagaaactcgcggttcgtgcgatttctcagttacaggctcttcctggtggagatattaagcttttgtgtgacactgtcgtggaaagtgtgagggacttgactggttatgatcgtgttatggtttataagtttcatgaagatgagcatggagaagttgtagctgagagtaaacgagatgatttagagccttatattggactgcatgttcctgctactgatattcctcaagcgtcaaggttcttgtttaagcagaaccgtgtccgaatgatagtagattgcaatgccacacctgttcttgtggtccaggacgataggctaactcagtctatgtgcttggttggttctactcttagggctcctcatggttgtcactctcagtatatggctaacatgggatctattgcgtctttagcaatggcggttataatcaatggaaatgaagatgatgggagcaatgtagctagtggaagaagctcgatgaggctttggggtttggttgtttgccatcacacttcttctcgctgcataccgtttccgctaaggtatgcttgtgagtttttgatgcaggctttcggtttacagttaaacatggaattgcagttagctttgcaaatgtcagagaaacgcgttttgagaacgcagacactgttatgtgatatgcttctgcgtgactcgcctgctggaattgttacacagagtcccagtatcatggacttagtgaaatgtgacggtgcagcatttctttaccacgggaagtattacccgttgggtgttgctcctagtgaagttcagataaaagatgttgtggagtggttgcttgcgaatcatgcggattcaaccggattaagcactgatagtttaggcgatgcggggtatcccggtgcagctgcgttaggggatgctgtgtgcggtatggcagttgcatatatcacaaaaagagactttcttttttggtttcgatctcacactgcgaaagaaatcaaatggggaggcgctaagcatcatccggaggataaagatgatgggcaacgaatgcatcctcgttcgtcctttcaggcttttcttgaagttgttaagagccggagtcagccatgggaaactgcggaaatggatgcgattcactcgctccagcttattctgagagactcttttaaagaatctgaggcggctatgaactctaaagttgtggatggtgtggttcagccatgtagggatatggcgggggaacaggggattgatgagttaggtgcagttgcaagagagatggttaggctcattgagactgcaactgttcctatattcgctgtggatgccggaggctgcatcaatggatggaacgctaagattgcagagttgacaggtctctcagttgaagaagctatggggaagtctctggtttctgatttaatatacaaagagaatgaagcaactgtcaataagcttctttctcgtgctttgagaggggacgaggaaaagaatgtggaggttaagctgaaaactttcagccccgaactacaagggaaagcagtttttgtggttgtgaatgcttgttccagcaaggactacttgaacaacattgtcggcgtttgttttgttggacaagacgttactagtcagaaaatcgtaatggataagttcatcaacatacaaggagattacaaggctattgtacatagcccaaaccctctaatcccgccaatttttgctgctgacgagaacacgtgctgcctggaatggaacatggcgatggaaaagcttacgggttggtctcgcagtgaagtgattgggaaaatgattgtcggggaagtgtttgggagctgttgcatgctaaagggtcctgatgctttaaccaagttcatgattgtattgcataatgcgattggtggccaagatacggataagttccctttcccattctttgaccgcaatgggaagtttgttcaggctctattgactgcaaacaagcgggttagcctcgagggaaaggttattggggctttctgtttcttgcaaatcccgagccctgagctgcagcaagctttagcagtccaacggaggcaggacacagagtgtttcacgaaggcaaaagagttggcttatatttgtcaggtgataaagaatcctttgagcggtatgcgtttcgcaaactcattgttggaggccacagacttgaacgaggaccagaagcagttacttgaaacaagtgtttcttgcgagaaacagatctcaaggatcgtcggggacatggatcttgaaagcattgaagacggttcatttgtgctaaagagggaagagtttttccttggaagtgtcataaacgcgattgtaagtcaagcgatgttcttattaagggacagaggtcttcagctgatccgtgacattcccgaagagatcaaatcaatagaggtttttggagaccagataaggattcaacagctcctggctgagtttctgctgagtataatccggtatgcaccatctcaagagtgggtggagatccatttaagccaactttcaaagcaaatggctgatggattcgccgccatccgcacagaattcagaatggcgtgtccaggtgaaggtctgcctccagagctagtccgagacatgttccatagcagcaggtggacaagccctgaaggtttaggtctaagcgtatgtcgaaagattttaaagctaatgaacggtgaggttcaatacatccgagaatcagaacggtcctatttcctcatcattctggaactccctgtacctcgaaagcgaccattgtcaactgctagtggaagtggtgacatgatgctgatgatgccatattagatggtttccggagtcgggggtagtggcggtggccgtggcggtggccgtggcggagaagaagaaccgtcgtcaagtcacactcctaataaccgaagaggaggagaacaagctcaatcgtcgggaacgaaatctctcagaccaagaagcaacactgaatcaatgagcaaagcaattcaacagtacaccgtcgacgcaagactccacgccgttttcgaacaatccggcgaatcagggaaatcattcgactactcacaatcactcaaaacgacgacgtacggttcctctgtacctgagcaacagatcacagcttatctctctcgaatccagcgaggtggttacattcagcctttcggatgtatgatcgccgtcgatgaatccagtttccggatcatcggttacagtgaaaacgccagagaaatgttagggattatgcctcaatctgttcctactcttgagaaacctgagattctagctatgggaactgatgtgagatctttgttcacttcttcgagctcgattctactcgagcgtgctttcgttgctcgagagattaccttgttaaatccggtttggatccattccaagaatactggtaaaccgttttacgccattcttcataggattgatgttggtgttgttattgatttagagccagctagaactgaagatcctgcgctttctattgctggtgctgttcaatcgcagaaactcgcggttcgtgcgatttctcagttacaggctcttcctggtggagatattaagcttttgtgtgacactgtcgtggaaagtgtgagggacttgactggttatgatcgtgttatggtttataagtttcatgaagatgagcatggagaagttgtagctgagagtaaacgagatgatttagagccttatattggactgcatgttcctgctactgatattcctcaagcgtcaaggttcttgtttaagcagaaccgtgtccgaatgatagtagattgcaatgccacacctgttcttgtggtccaggacgataggctaactcagtctatgtgcttggttggttctactcttagggctcctcatggttgtcactctcagtatatggctaacatgggatctattgcgtctttagcaatggcggttataatcaatggaaatgaagatgatgggagcaatgtagctagtggaagaagctcgatgaggctttggggtttggttgtttgccatcacacttcttctcgctgcataccgtttccgctaaggtatgcttgtgagtttttgatgcaggctttcggtttacagttaaacatggaattgcagttagctttgcaaatgtcagagaaacgcgttttgagaacgcagacactgttatgtgatatgcttctgcgtgactcgcctgctggaattgttacacagagtcccagtatcatggacttagtgaaatgtgacggtgcagcatttctttaccacgggaagtattacccgttgggtgttgctcctagtgaagttcagataaaagatgttgtggagtggttgcttgcgaatcatgcggattcaaccggattaagcactgatagtttaggcgatgcggggtatcccggtgcagctgcgttaggggatgctgtgtgcggtatggcagttgcatatatcacaaaaagagactttcttttttggtttcgatctcacactgcgaaagaaatcaaatggggaggcgctaagcatcatccggaggataaagatgatgggcaacgaatgcatcctcgttcgtcctttcaggcttttcttgaagttgttaagagccggagtcagccatgggaaactgcggaaatggatgcgattcactcgctccagcttattctgagagactcttttaaagaatctgaggcggctatgaactctaaagttgtggatggtgtggttcagccatgtagggatatggcgggggaacaggggattgatgagttaggtgcagttgcaagagagatggttaggctcattgagactgcaactgttcctatattcgctgtggatgccggaggctgcatcaatggatggaacgctaagattgcagagttgacaggtctctcagttgaagaagctatggggaagtctctggtttctgatttaatatacaaagagaatgaagcaactgtcaataagcttctttctcgtgctttgagaggggacgaggaaaagaatgtggaggttaagctgaaaactttcagccccgaactacaagggaaagcagtttttgtggttgtgaatgcttgttccagcaaggactacttgaacaacattgtcggcgtttgttttgttggacaagacgttactagtcagaaaatcgtaatggataagttcatcaacatacaaggagattacaaggctattgtacatagcccaaaccctctaatcccgccaatttttgctgctgacgagaacacgtgctgcctggaatggaacatggcgatggaaaagcttacgggttggtctcgcagtgaagtgattgggaaaatgattgtcggggaagtgtttgggagctgttgcatgctaaagggtcctgatgctttaaccaagttcatgattgtattgcataatgcgattggtggccaagatacggataagttccctttcccattctttgaccgcaatgggaagtttgttcaggctctattgactgcaaacaagcgggttagcctcgagggaaaggttattggggctttctgtttcttgcaaatcccgagccctgagctgcagcaagctttagcagtccaacggaggcaggacacagagtgtttcacgaaggcaaaagagttggcttatatttgtcaggtgataaagaatcctttgagcggtatgcgtttcgcaaactcattgttggaggccacagacttgaacgaggaccagaagcagttacttgaaacaagtgtttcttgcgagaaacagatctcaaggatcgtcggggacatggatcttgaaagcattgaagacggttcatttgtgctaaagagggaagagtttttccttggaagtgtcataaacgcgattgtaagtcaagcgatgttcttattaagggacagaggtcttcagctgatccgtgacattcccgaagagatcaaatcaatagaggtttttggagaccagataaggattcaacagctcctggctgagtttctgctgagtataatccggtatgcaccatctcaagagtgggtggagatccatttaagccaactttcaaagcaaatggctgatggattcgccgccatccgcacagaattcagaatggcgtgtccaggtgaaggtctgcctccagagctagtccgagacatgttccatagcagcaggtggacaagccctgaaggtttaggtctaagcgtatgtcgaaagattttaaagctaatgaacggtgaggttcaatacatccgagaatcagaacggtcctatttcctcatcattctggaactccctgtacctcgaaagcgaccattgtcaactgctagtggaagtggtgacatgatgctgatgatgccatattagatggtttccggagtcgggggtagtggcggtggccgtggcggtggccgtggcggagaagaagaaccgtcgtcaagtcacactcctaataaccgaagaggaggagaacaagctcaatcgtcgggaacgaaatctctcagaccaagaagcaacactgaatcaatgagcaaagcaattcaacagtacaccgtcgacgcaagactccacgccgttttcgaacaatccggcgaatcagggaaatcattcgactactcacaatcactcaaaacgacgacgtacggttcctctgtacctgagcaacagatcacagcttatctctctcgaatccagcgaggtggttacattcagcctttcggatgtatgatcgccgtcgatgaatccagtttccggatcatcggttacagtgaaaacgccagagaaatgttagggattatgcctcaatctgttcctactcttgagaaacctgagattctagctatgggaactgatgtgagatctttgttcacttcttcgagctcgattctactcgagcgtgctttcgttgctcgagagattaccttgttaaatccggtttggatccattccaagaatactggtaaaccgttttacgccattcttcataggattgatgttggtgttgttattgatttagagccagctagaactgaagatcctgcgctttctattgctggtgctgttcaatcgcagaaactcgcggttcgtgcgatttctcagttacaggctcttcctggtggagatattaagcttttgtgtgacactgtcgtggaaagtgtgagggacttgactggttatgatcgtgttatggtttataagtttcatgaagatgagcatggagaagttgtagctgagagtaaacgagatgatttagagccttatattggactgcatgttcctgctactgatattcctcaagcgtcaaggttcttgtttaagcagaaccgtgtccgaatgatagtagattgcaatgccacacctgttcttgtggtccaggacgataggctaactcagtctatgtgcttggttggttctactcttagggctcctcatggttgtcactctcagtatatggctaacatgggatctattgcgtctttagcaatggcggttataatcaatggaaatgaagatgatgggagcaatgtagctagtggaagaagctcgatgaggctttggggtttggttgtttgccatcacacttcttctcgctgcataccgtttccgctaaggtatgcttgtgagtttttgatgcaggctttcggtttacagttaaacatggaattgcagttagctttgcaaatgtcagagaaacgcgttttgagaacgcagacactgttatgtgatatgcttctgcgtgactcgcctgctggaattgttacacagagtcccagtatcatggacttagtgaaatgtgacggtgcagcatttctttaccacgggaagtattacccgttgggtgttgctcctagtgaagttcagataaaagatgttgtggagtggttgcttgcgaatcatgcggattcaaccggattaagcactgatagtttaggcgatgcggggtatcccggtgcagctgcgttaggggatgctgtgtgcggtatggcagttgcatatatcacaaaaagagactttcttttttggtttcgatctcacactgcgaaagaaatcaaatggggaggcgctaagcatcatccggaggataaagatgatgggcaacgaatgcatcctcgttcgtcctttcaggcttttcttgaagttgttaagagccggagtcagccatgggaaactgcggaaatggatgcgattcactcgctccagcttattctgagagactcttttaaagaatctgaggcggctatgaactctaaagttgtggatggtgtggttcagccatgtagggatatggcgggggaacaggggattgatgagttaggtgcagttgcaagagagatggttaggctcattgagactgcaactgttcctatattcgctgtggatgccggaggctgcatcaatggatggaacgctaagattgcagagttgacaggtctctcagttgaagaagctatggggaagtctctggtttctgatttaatatacaaagagaatgaagcaactgtcaataagcttctttctcgtgctttgagaggggacgaggaaaagaatgtggaggttaagctgaaaactttcagccccgaactacaagggaaagcagtttttgtggttgtgaatgcttgttccagcaaggactacttgaacaacattgtcggcgtttgttttgttggacaagacgttactagtcagaaaatcgtaatggataagttcatcaacatacaaggagattacaaggctattgtacatagcccaaaccctctaatcccgccaatttttgctgctgacgagaacacgtgctgcctggaatggaacatggcgatggaaaagcttacgggttggtctcgcagtgaagtgattgggaaaatgattgtcggggaagtgtttgggagctgttgcatgctaaagggtcctgatgctttaaccaagttcatgattgtattgcataatgcgattggtggccaagatacggataagttccctttcccattctttgaccgcaatgggaagtttgttcaggctctattgactgcaaacaagcgggttagcctcgagggaaaggttattggggctttctgtttcttgcaaatcccgagccctgagctgcagcaagctttagcagtccaacggaggcaggacacagagtgtttcacgaaggcaaaagagttggcttatatttgtcaggtgataaagaatcctttgagcggtatgcgtttcgcaaactcattgttggaggccacagacttgaacgaggaccagaagcagttacttgaaacaagtgtttcttgcgagaaacagatctcaaggatcgtcggggacatggatcttgaaagcattgaagacggttcatttgtgctaaagagggaagagtttttccttggaagtgtcataaacgcgattgtaagtcaagcgatgttcttattaagggacagaggtcttcagctgatccgtgacattcccgaagagatcaaatcaatagaggtttttggagaccagataaggattcaacagctcctggctgagtttctgctgagtataatccggtatgcaccatctcaagagtgggtggagatccatttaagccaactttcaaagcaaatggctgatggattcgccgccatccgcacagaattcagaatggcgtgtccaggtgaaggtctgcctccagagctagtccgagacatgttccatagcagcaggtggacaagccctgaaggtttaggtctaagcgtatgtcgaaagattttaaagctaatgaacggtgaggttcaatacatccgagaatcagaacggtcctatttcctcatcattctggaactccctgtacctcgaaagcgaccattgtcaactgctagtggaagtggtgacatgatgctgatgatgccatattagatggtttccggagtcgggggtagtggcggtggccgtggcggtggccgtggcggagaagaagaaccgtcgtcaagtcacactcctaataaccgaagaggaggagaacaagctcaatcgtcgggaacgaaatctctcagaccaagaagcaacactgaatcaatgagcaaagcaattcaacagtacaccgtcgacgcaagactccacgccgttttcgaacaatccggcgaatcagggaaatcattcgactactcacaatcactcaaaacgacgacgtacggttcctctgtacctgagcaacagatcacagcttatctctctcgaatccagcgaggtggttacattcagcctttcggatgtatgatcgccgtcgatgaatccagtttccggatcatcggttacagtgaaaacgccagagaaatgttagggattatgcctcaatctgttcctactcttgagaaacctgagattctagctatgggaactgatgtgagatctttgttcacttcttcgagctcgattctactcgagcgtgctttcgttgctcgagagattaccttgttaaatccggtttggatccattccaagaatactggtaaaccgttttacgccattcttcataggattgatgttggtgttgttattgatttagagccagctagaactgaagatcctgcgctttctattgctggtgctgttcaatcgcagaaactcgcggttcgtgcgatttctcagttacaggctcttcctggtggagatattaagcttttgtgtgacactgtcgtggaaagtgtgagggacttgactggttatgatcgtgttatggtttataagtttcatgaagatgagcatggagaagttgtagctgagagtaaacgagatgatttagagccttatattggactgcatgttcctgctactgatattcctcaagcgtcaaggttcttgtttaagcagaaccgtgtccgaatgatagtagattgcaatgccacacctgttcttgtggtccaggacgataggctaactcagtctatgtgcttggttggttctactcttagggctcctcatggttgtcactctcagtatatggctaacatgggatctattgcgtctttagcaatggcggttataatcaatggaaatgaagatgatgggagcaatgtagctagtggaagaagctcgatgaggctttggggtttggttgtttgccatcacacttcttctcgctgcataccgtttccgctaaggtatgcttgtgagtttttgatgcaggctttcggtttacagttaaacatggaattgcagttagctttgcaaatgtcagagaaacgcgttttgagaacgcagacactgttatgtgatatgcttctgcgtgactcgcctgctggaattgttacacagagtcccagtatcatggacttagtgaaatgtgacggtgcagcatttctttaccacgggaagtattacccgttgggtgttgctcctagtgaagttcagataaaagatgttgtggagtggttgcttgcgaatcatgcggattcaaccggattaagcactgatagtttaggcgatgcggggtatcccggtgcagctgcgttaggggatgctgtgtgcggtatggcagttgcatatatcacaaaaagagactttcttttttggtttcgatctcacactgcgaaagaaatcaaatggggaggcgctaagcatcatccggaggataaagatgatgggcaacgaatgcatcctcgttcgtcctttcaggcttttcttgaagttgttaagagccggagtcagccatgggaaactgcggaaatggatgcgattcactcgctccagcttattctgagagactcttttaaagaatctgaggcggctatgaactctaaagttgtggatggtgtggttcagccatgtagggatatggcgggggaacaggggattgatgagttaggtgcagttgcaagagagatggttaggctcattgagactgcaactgttcctatattcgctgtggatgccggaggctgcatcaatggatggaacgctaagattgcagagttgacaggtctctcagttgaagaagctatggggaagtctctggtttctgatttaatatacaaagagaatgaagcaactgtcaataagcttctttctcgtgctttgagaggggacgaggaaaagaatgtggaggttaagctgaaaactttcagccccgaactacaagggaaagcagtttttgtggttgtgaatgcttgttccagcaaggactacttgaacaacattgtcggcgtttgttttgttggacaagacgttactagtcagaaaatcgtaatggataagttcatcaacatacaaggagattacaaggctattgtacatagcccaaaccctctaatcccgccaatttttgctgctgacgagaacacgtgctgcctggaatggaacatggcgatggaaaagcttacgggttggtctcgcagtgaagtgattgggaaaatgattgtcggggaagtgtttgggagctgttgcatgctaaagggtcctgatgctttaaccaagttcatgattgtattgcataatgcgattggtggccaagatacggataagttccctttcccattctttgaccgcaatgggaagtttgttcaggctctattgactgcaaacaagcgggttagcctcgagggaaaggttattggggctttctgtttcttgcaaatcccgagccctgagctgcagcaagctttagcagtccaacggaggcaggacacagagtgtttcacgaaggcaaaagagttggcttatatttgtcaggtgataaagaatcctttgagcggtatgcgtttcgcaaactcattgttggaggccacagacttgaacgaggaccagaagcagttacttgaaacaagtgtttcttgcgagaaacagatctcaaggatcgtcggggacatggatcttgaaagcattgaagacggttcatttgtgctaaagagggaagagtttttccttggaagtgtcataaacgcgattgtaagtcaagcgatgttcttattaagggacagaggtcttcagctgatccgtgacattcccgaagagatcaaatcaatagaggtttttggagaccagataaggattcaacagctcctggctgagtttctgctgagtataatccggtatgcaccatctcaagagtgggtggagatccatttaagccaactttcaaagcaaatggctgatggattcgccgccatccgcacagaattcagaatggcgtgtccaggtgaaggtctgcctccagagctagtccgagacatgttccatagcagcaggtggacaagccctgaaggtttaggtctaagcgtatgtcgaaagattttaaagctaatgaacggtgaggttcaatacatccgagaatcagaacggtcctatttcctcatcattctggaactccctgtacctcgaaagcgaccattgtcaactgctagtggaagtggtgacatgatgctgatgatgccatattagatggtttccggagtcgggggtagtggcggtggccgtggcggtggccgtggcggagaagaagaaccgtcgtcaagtcacactcctaataaccgaagaggaggagaacaagctcaatcgtcgggaacgaaatctctcagaccaagaagcaacactgaatcaatgagcaaagcaattcaacagtacaccgtcgacgcaagactccacgccgttttcgaacaatccggcgaatcagggaaatcattcgactactcacaatcactcaaaacgacgacgtacggttcctctgtacctgagcaacagatcacagcttatctctctcgaatccagcgaggtggttacattcagcctttcggatgtatgatcgccgtcgatgaatccagtttccggatcatcggttacagtgaaaacgccagagaaatgttagggattatgcctcaatctgttcctactcttgagaaacctgagattctagctatgggaactgatgtgagatctttgttcacttcttcgagctcgattctactcgagcgtgctttcgttgctcgagagattaccttgttaaatccggtttggatccattccaagaatactggtaaaccgttttacgccattcttcataggattgatgttggtgttgttattgatttagagccagctagaactgaagatcctgcgctttctattgctggtgctgttcaatcgcagaaactcgcggttcgtgcgatttctcagttacaggctcttcctggtggagatattaagcttttgtgtgacactgtcgtggaaagtgtgagggacttgactggttatgatcgtgttatggtttataagtttcatgaagatgagcatggagaagttgtagctgagagtaaacgagatgatttagagccttatattggactgcatgttcctgctactgatattcctcaagcgtcaaggttcttgtttaagcagaaccgtgtccgaatgatagtagattgcaatgccacacctgttcttgtggtccaggacgataggctaactcagtctatgtgcttggttggttctactcttagggctcctcatggttgtcactctcagtatatggctaacatgggatctattgcgtctttagcaatggcggttataatcaatggaaatgaagatgatgggagcaatgtagctagtggaagaagctcgatgaggctttggggtttggttgtttgccatcacacttcttctcgctgcataccgtttccgctaaggtatgcttgtgagtttttgatgcaggctttcggtttacagttaaacatggaattgcagttagctttgcaaatgtcagagaaacgcgttttgagaacgcagacactgttatgtgatatgcttctgcgtgactcgcctgctggaattgttacacagagtcccagtatcatggacttagtgaaatgtgacggtgcagcatttctttaccacgggaagtattacccgttgggtgttgctcctagtgaagttcagataaaagatgttgtggagtggttgcttgcgaatcatgcggattcaaccggattaagcactgatagtttaggcgatgcggggtatcccggtgcagctgcgttaggggatgctgtgtgcggtatggcagttgcatatatcacaaaaagagactttcttttttggtttcgatctcacactgcgaaagaaatcaaatggggaggcgctaagcatcatccggaggataaagatgatgggcaacgaatgcatcctcgttcgtcctttcaggcttttcttgaagttgttaagagccggagtcagccatgggaaactgcggaaatggatgcgattcactcgctccagcttattctgagagactcttttaaagaatctgaggcggctatgaactctaaagttgtggatggtgtggttcagccatgtagggatatggcgggggaacaggggattgatgagttaggtgcagttgcaagagagatggttaggctcattgagactgcaactgttcctatattcgctgtggatgccggaggctgcatcaatggatggaacgctaagattgcagagttgacaggtctctcagttgaagaagctatggggaagtctctggtttctgatttaatatacaaagagaatgaagcaactgtcaataagcttctttctcgtgctttgagaggggacgaggaaaagaatgtggaggttaagctgaaaactttcagccccgaactacaagggaaagcagtttttgtggttgtgaatgcttgttccagcaaggactacttgaacaacattgtcggcgtttgttttgttggacaagacgttactagtcagaaaatcgtaatggataagttcatcaacatacaaggagattacaaggctattgtacatagcccaaaccctctaatcccgccaatttttgctgctgacgagaacacgtgctgcctggaatggaacatggcgatggaaaagcttacgggttggtctcgcagtgaagtgattgggaaaatgattgtcggggaagtgtttgggagctgttgcatgctaaagggtcctgatgctttaaccaagttcatgattgtattgcataatgcgattggtggccaagatacggataagttccctttcccattctttgaccgcaatgggaagtttgttcaggctctattgactgcaaacaagcgggttagcctcgagggaaaggttattggggctttctgtttcttgcaaatcccgagccctgagctgcagcaagctttagcagtccaacggaggcaggacacagagtgtttcacgaaggcaaaagagttggcttatatttgtcaggtgataaagaatcctttgagcggtatgcgtttcgcaaactcattgttggaggccacagacttgaacgaggaccagaagcagttacttgaaacaagtgtttcttgcgagaaacagatctcaaggatcgtcggggacatggatcttgaaagcattgaagacggttcatttgtgctaaagagggaagagtttttccttggaagtgtcataaacgcgattgtaagtcaagcgatgttcttattaagggacagaggtcttcagctgatccgtgacattcccgaagagatcaaatcaatagaggtttttggagaccagataaggattcaacagctcctggctgagtttctgctgagtataatccggtatgcaccatctcaagagtgggtggagatccatttaagccaactttcaaagcaaatggctgatggattcgccgccatccgcacagaattcagaatggcgtgtccaggtgaaggtctgcctccagagctagtccgagacatgttccatagcagcaggtggacaagccctgaaggtttaggtctaagcgtatgtcgaaagattttaaagctaatgaacggtgaggttcaatacatccgagaatcagaacggtcctatttcctcatcattctggaactccctgtacctcgaaagcgaccattgtcaactgctagtggaagtggtgacatgatgctgatgatgccatattagatggtttccggagtcgggggtagtggcggtggccgtggcggtggccgtggcggagaagaagaaccgtcgtcaagtcacactcctaataaccgaagaggaggagaacaagctcaatcgtcgggaacgaaatctctcagaccaagaagcaacactgaatcaatgagcaaagcaattcaacagtacaccgtcgacgcaagactccacgccgttttcgaacaatccggcgaatcagggaaatcattcgactactcacaatcactcaaaacgacgacgtacggttcctctgtacctgagcaacagatcacagcttatctctctcgaatccagcgaggtggttacattcagcctttcggatgtatgatcgccgtcgatgaatccagtttccggatcatcggttacagtgaaaacgccagagaaatgttagggattatgcctcaatctgttcctactcttgagaaacctgagattctagctatgggaactgatgtgagatctttgttcacttcttcgagctcgattctactcgagcgtgctttcgttgctcgagagattaccttgttaaatccggtttggatccattccaagaatactggtaaaccgttttacgccattcttcataggattgatgttggtgttgttattgatttagagccagctagaactgaagatcctgcgctttctattgctggtgctgttcaatcgcagaaactcgcggttcgtgcgatttctcagttacaggctcttcctggtggagatattaagcttttgtgtgacactgtcgtggaaagtgtgagggacttgactggttatgatcgtgttatggtttataagtttcatgaagatgagcatggagaagttgtagctgagagtaaacgagatgatttagagccttatattggactgcatgttcctgctactgatattcctcaagcgtcaaggttcttgtttaagcagaaccgtgtccgaatgatagtagattgcaatgccacacctgttcttgtggtccaggacgataggctaactcagtctatgtgcttggttggttctactcttagggctcctcatggttgtcactctcagtatatggctaacatgggatctattgcgtctttagcaatggcggttataatcaatggaaatgaagatgatgggagcaatgtagctagtggaagaagctcgatgaggctttggggtttggttgtttgccatcacacttcttctcgctgcataccgtttccgctaaggtatgcttgtgagtttttgatgcaggctttcggtttacagttaaacatggaattgcagttagctttgcaaatgtcagagaaacgcgttttgagaacgcagacactgttatgtgatatgcttctgcgtgactcgcctgctggaattgttacacagagtcccagtatcatggacttagtgaaatgtgacggtgcagcatttctttaccacgggaagtattacccgttgggtgttgctcctagtgaagttcagataaaagatgttgtggagtggttgcttgcgaatcatgcggattcaaccggattaagcactgatagtttaggcgatgcggggtatcccggtgcagctgcgttaggggatgctgtgtgcggtatggcagttgcatatatcacaaaaagagactttcttttttggtttcgatctcacactgcgaaagaaatcaaatggggaggcgctaagcatcatccggaggataaagatgatgggcaacgaatgcatcctcgttcgtcctttcaggcttttcttgaagttgttaagagccggagtcagccatgggaaactgcggaaatggatgcgattcactcgctccagcttattctgagagactcttttaaagaatctgaggcggctatgaactctaaagttgtggatggtgtggttcagccatgtagggatatggcgggggaacaggggattgatgagttaggtgcagttgcaagagagatggttaggctcattgagactgcaactgttcctatattcgctgtggatgccggaggctgcatcaatggatggaacgctaagattgcagagttgacaggtctctcagttgaagaagctatggggaagtctctggtttctgatttaatatacaaagagaatgaagcaactgtcaataagcttctttctcgtgctttgagaggggacgaggaaaagaatgtggaggttaagctgaaaactttcagccccgaactacaagggaaagcagtttttgtggttgtgaatgcttgttccagcaaggactacttgaacaacattgtcggcgtttgttttgttggacaagacgttactagtcagaaaatcgtaatggataagttcatcaacatacaaggagattacaaggctattgtacatagcccaaaccctctaatcccgccaatttttgctgctgacgagaacacgtgctgcctggaatggaacatggcgatggaaaagcttacgggttggtctcgcagtgaagtgattgggaaaatgattgtcggggaagtgtttgggagctgttgcatgctaaagggtcctgatgctttaaccaagttcatgattgtattgcataatgcgattggtggccaagatacggataagttccctttcccattctttgaccgcaatgggaagtttgttcaggctctattgactgcaaacaagcgggttagcctcgagggaaaggttattggggctttctgtttcttgcaaatcccgagccctgagctgcagcaagctttagcagtccaacggaggcaggacacagagtgtttcacgaaggcaaaagagttggcttatatttgtcaggtgataaagaatcctttgagcggtatgcgtttcgcaaactcattgttggaggccacagacttgaacgaggaccagaagcagttacttgaaacaagtgtttcttgcgagaaacagatctcaaggatcgtcggggacatggatcttgaaagcattgaagacggttcatttgtgctaaagagggaagagtttttccttggaagtgtcataaacgcgattgtaagtcaagcgatgttcttattaagggacagaggtcttcagctgatccgtgacattcccgaagagatcaaatcaatagaggtttttggagaccagataaggattcaacagctcctggctgagtttctgctgagtataatccggtatgcaccatctcaagagtgggtggagatccatttaagccaactttcaaagcaaatggctgatggattcgccgccatccgcacagaattcagaatggcgtgtccaggtgaaggtctgcctccagagctagtccgagacatgttccatagcagcaggtggacaagccctgaaggtttaggtctaagcgtatgtcgaaagattttaaagctaatgaacggtgaggttcaatacatccgagaatcagaacggtcctatttcctcatcattctggaactccctgtacctcgaaagcgaccattgtcaactgctagtggaagtggtgacatgatgctgatgatgccatattagatggtttccggagtcgggggtagtggcggtggccgtggcggtggccgtggcggagaagaagaaccgtcgtcaagtcacactcctaataaccgaagaggaggagaacaagctcaatcgtcgggaacgaaatctctcagaccaagaagcaacactgaatcaatgagcaaagcaattcaacagtacaccgtcgacgcaagactccacgccgttttcgaacaatccggcgaatcagggaaatcattcgactactcacaatcactcaaaacgacgacgtacggttcctctgtacctgagcaacagatcacagcttatctctctcgaatccagcgaggtggttacattcagcctttcggatgtatgatcgccgtcgatgaatccagtttccggatcatcggttacagtgaaaacgccagagaaatgttagggattatgcctcaatctgttcctactcttgagaaacctgagattctagctatgggaactgatgtgagatctttgttcacttcttcgagctcgattctactcgagcgtgctttcgttgctcgagagattaccttgttaaatccggtttggatccattccaagaatactggtaaaccgttttacgccattcttcataggattgatgttggtgttgttattgatttagagccagctagaactgaagatcctgcgctttctattgctggtgctgttcaatcgcagaaactcgcggttcgtgcgatttctcagttacaggctcttcctggtggagatattaagcttttgtgtgacactgtcgtggaaagtgtgagggacttgactggttatgatcgtgttatggtttataagtttcatgaagatgagcatggagaagttgtagctgagagtaaacgagatgatttagagccttatattggactgcatgttcctgctactgatattcctcaagcgtcaaggttcttgtttaagcagaaccgtgtccgaatgatagtagattgcaatgccacacctgttcttgtggtccaggacgataggctaactcagtctatgtgcttggttggttctactcttagggctcctcatggttgtcactctcagtatatggctaacatgggatctattgcgtctttagcaatggcggttataatcaatggaaatgaagatgatgggagcaatgtagctagtggaagaagctcgatgaggctttggggtttggttgtttgccatcacacttcttctcgctgcataccgtttccgctaaggtatgcttgtgagtttttgatgcaggctttcggtttacagttaaacatggaattgcagttagctttgcaaatgtcagagaaacgcgttttgagaacgcagacactgttatgtgatatgcttctgcgtgactcgcctgctggaattgttacacagagtcccagtatcatggacttagtgaaatgtgacggtgcagcatttctttaccacgggaagtattacccgttgggtgttgctcctagtgaagttcagataaaagatgttgtggagtggttgcttgcgaatcatgcggattcaaccggattaagcactgatagtttaggcgatgcggggtatcccggtgcagctgcgttaggggatgctgtgtgcggtatggcagttgcatatatcacaaaaagagactttcttttttggtttcgatctcacactgcgaaagaaatcaaatggggaggcgctaagcatcatccggaggataaagatgatgggcaacgaatgcatcctcgttcgtcctttcaggcttttcttgaagttgttaagagccggagtcagccatgggaaactgcggaaatggatgcgattcactcgctccagcttattctgagagactcttttaaagaatctgaggcggctatgaactctaaagttgtggatggtgtggttcagccatgtagggatatggcgggggaacaggggattgatgagttaggtgcagttgcaagagagatggttaggctcattgagactgcaactgttcctatattcgctgtggatgccggaggctgcatcaatggatggaacgctaagattgcagagttgacaggtctctcagttgaagaagctatggggaagtctctggtttctgatttaatatacaaagagaatgaagcaactgtcaataagcttctttctcgtgctttgagaggggacgaggaaaagaatgtggaggttaagctgaaaactttcagccccgaactacaagggaaagcagtttttgtggttgtgaatgcttgttccagcaaggactacttgaacaacattgtcggcgtttgttttgttggacaagacgttactagtcagaaaatcgtaatggataagttcatcaacatacaaggagattacaaggctattgtacatagcccaaaccctctaatcccgccaatttttgctgctgacgagaacacgtgctgcctggaatggaacatggcgatggaaaagcttacgggttggtctcgcagtgaagtgattgggaaaatgattgtcggggaagtgtttgggagctgttgcatgctaaagggtcctgatgctttaaccaagttcatgattgtattgcataatgcgattggtggccaagatacggataagttccctttcccattctttgaccgcaatgggaagtttgttcaggctctattgactgcaaacaagcgggttagcctcgagggaaaggttattggggctttctgtttcttgcaaatcccgagccctgagctgcagcaagctttagcagtccaacggaggcaggacacagagtgtttcacgaaggcaaaagagttggcttatatttgtcaggtgataaagaatcctttgagcggtatgcgtttcgcaaactcattgttggaggccacagacttgaacgaggaccagaagcagttacttgaaacaagtgtttcttgcgagaaacagatctcaaggatcgtcggggacatggatcttgaaagcattgaagacggttcatttgtgctaaagagggaagagtttttccttggaagtgtcataaacgcgattgtaagtcaagcgatgttcttattaagggacagaggtcttcagctgatccgtgacattcccgaagagatcaaatcaatagaggtttttggagaccagataaggattcaacagctcctggctgagtttctgctgagtataatccggtatgcaccatctcaagagtgggtggagatccatttaagccaactttcaaagcaaatggctgatggattcgccgccatccgcacagaattcagaatggcgtgtccaggtgaaggtctgcctccagagctagtccgagacatgttccatagcagcaggtggacaagccctgaaggtttaggtctaagcgtatgtcgaaagattttaaagctaatgaacggtgaggttcaatacatccgagaatcagaacggtcctatttcctcatcattctggaactccctgtacctcgaaagcgaccattgtcaactgctagtggaagtggtgacatgatgctgatgatgccatattagatggtttccggagtcgggggtagtggcggtggccgtggcggtggccgtggcggagaagaagaaccgtcgtcaagtcacactcctaataaccgaagaggaggagaacaagctcaatcgtcgggaacgaaatctctcagaccaagaagcaacactgaatcaatgagcaaagcaattcaacagtacaccgtcgacgcaagactccacgccgttttcgaacaatccggcgaatcagggaaatcattcgactactcacaatcactcaaaacgacgacgtacggttcctctgtacctgagcaacagatcacagcttatctctctcgaatccagcgaggtggttacattcagcctttcggatgtatgatcgccgtcgatgaatccagtttccggatcatcggttacagtgaaaacgccagagaaatgttagggattatgcctcaatctgttcctactcttgagaaacctgagattctagctatgggaactgatgtgagatctttgttcacttcttcgagctcgattctactcgagcgtgctttcgttgctcgagagattaccttgttaaatccggtttggatccattccaagaatactggtaaaccgttttacgccattcttcataggattgatgttggtgttgttattgatttagagccagctagaactgaagatcctgcgctttctattgctggtgctgttcaatcgcagaaactcgcggttcgtgcgatttctcagttacaggctcttcctggtggagatattaagcttttgtgtgacactgtcgtggaaagtgtgagggacttgactggttatgatcgtgttatggtttataagtttcatgaagatgagcatggagaagttgtagctgagagtaaacgagatgatttagagccttatattggactgcatgttcctgctactgatattcctcaagcgtcaaggttcttgtttaagcagaaccgtgtccgaatgatagtagattgcaatgccacacctgttcttgtggtccaggacgataggctaactcagtctatgtgcttggttggttctactcttagggctcctcatggttgtcactctcagtatatggctaacatgggatctattgcgtctttagcaatggcggttataatcaatggaaatgaagatgatgggagcaatgtagctagtggaagaagctcgatgaggctttggggtttggttgtttgccatcacacttcttctcgctgcataccgtttccgctaaggtatgcttgtgagtttttgatgcaggctttcggtttacagttaaacatggaattgcagttagctttgcaaatgtcagagaaacgcgttttgagaacgcagacactgttatgtgatatgcttctgcgtgactcgcctgctggaattgttacacagagtcccagtatcatggacttagtgaaatgtgacggtgcagcatttctttaccacgggaagtattacccgttgggtgttgctcctagtgaagttcagataaaagatgttgtggagtggttgcttgcgaatcatgcggattcaaccggattaagcactgatagtttaggcgatgcggggtatcccggtgcagctgcgttaggggatgctgtgtgcggtatggcagttgcatatatcacaaaaagagactttcttttttggtttcgatctcacactgcgaaagaaatcaaatggggaggcgctaagcatcatccggaggataaagatgatgggcaacgaatgcatcctcgttcgtcctttcaggcttttcttgaagttgttaagagccggagtcagccatgggaaactgcggaaatggatgcgattcactcgctccagcttattctgagagactcttttaaagaatctgaggcggctatgaactctaaagttgtggatggtgtggttcagccatgtagggatatggcgggggaacaggggattgatgagttaggtgcagttgcaagagagatggttaggctcattgagactgcaactgttcctatattcgctgtggatgccggaggctgcatcaatggatggaacgctaagattgcagagttgacaggtctctcagttgaagaagctatggggaagtctctggtttctgatttaatatacaaagagaatgaagcaactgtcaataagcttctttctcgtgctttgagaggggacgaggaaaagaatgtggaggttaagctgaaaactttcagccccgaactacaagggaaagcagtttttgtggttgtgaatgcttgttccagcaaggactacttgaacaacattgtcggcgtttgttttgttggacaagacgttactagtcagaaaatcgtaatggataagttcatcaacatacaaggagattacaaggctattgtacatagcccaaaccctctaatcccgccaatttttgctgctgacgagaacacgtgctgcctggaatggaacatggcgatggaaaagcttacgggttggtctcgcagtgaagtgattgggaaaatgattgtcggggaagtgtttgggagctgttgcatgctaaagggtcctgatgctttaaccaagttcatgattgtattgcataatgcgattggtggccaagatacggataagttccctttcccattctttgaccgcaatgggaagtttgttcaggctctattgactgcaaacaagcgggttagcctcgagggaaaggttattggggctttctgtttcttgcaaatcccgagccctgagctgcagcaagctttagcagtccaacggaggcaggacacagagtgtttcacgaaggcaaaagagttggcttatatttgtcaggtgataaagaatcctttgagcggtatgcgtttcgcaaactcattgttggaggccacagacttgaacgaggaccagaagcagttacttgaaacaagtgtttcttgcgagaaacagatctcaaggatcgtcggggacatggatcttgaaagcattgaagacggttcatttgtgctaaagagggaagagtttttccttggaagtgtcataaacgcgattgtaagtcaagcgatgttcttattaagggacagaggtcttcagctgatccgtgacattcccgaagagatcaaatcaatagaggtttttggagaccagataaggattcaacagctcctggctgagtttctgctgagtataatccggtatgcaccatctcaagagtgggtggagatccatttaagccaactttcaaagcaaatggctgatggattcgccgccatccgcacagaattcagaatggcgtgtccaggtgaaggtctgcctccagagctagtccgagacatgttccatagcagcaggtggacaagccctgaaggtttaggtctaagcgtatgtcgaaagattttaaagctaatgaacggtgaggttcaatacatccgagaatcagaacggtcctatttcctcatcattctggaactccctgtacctcgaaagcgaccattgtcaactgctagtggaagtggtgacatgatgctgatgatgccatattagatggtttccggagtcgggggtagtggcggtggccgtggcggtggccgtggcggagaagaagaaccgtcgtcaagtcacactcctaataaccgaagaggaggagaacaagctcaatcgtcgggaacgaaatctctcagaccaagaagcaacactgaatcaatgagcaaagcaattcaacagtacaccgtcgacgcaagactccacgccgttttcgaacaatccggcgaatcagggaaatcattcgactactcacaatcactcaaaacgacgacgtacggttcctctgtacctgagcaacagatcacagcttatctctctcgaatccagcgaggtggttacattcagcctttcggatgtatgatcgccgtcgatgaatccagtttccggatcatcggttacagtgaaaacgccagagaaatgttagggattatgcctcaatctgttcctactcttgagaaacctgagattctagctatgggaactgatgtgagatctttgttcacttcttcgagctcgattctactcgagcgtgctttcgttgctcgagagattaccttgttaaatccggtttggatccattccaagaatactggtaaaccgttttacgccattcttcataggattgatgttggtgttgttattgatttagagccagctagaactgaagatcctgcgctttctattgctggtgctgttcaatcgcagaaactcgcggttcgtgcgatttctcagttacaggctcttcctggtggagatattaagcttttgtgtgacactgtcgtggaaagtgtgagggacttgactggttatgatcgtgttatggtttataagtttcatgaagatgagcatggagaagttgtagctgagagtaaacgagatgatttagagccttatattggactgcatgttcctgctactgatattcctcaagcgtcaaggttcttgtttaagcagaaccgtgtccgaatgatagtagattgcaatgccacacctgttcttgtggtccaggacgataggctaactcagtctatgtgcttggttggttctactcttagggctcctcatggttgtcactctcagtatatggctaacatgggatctattgcgtctttagcaatggcggttataatcaatggaaatgaagatgatgggagcaatgtagctagtggaagaagctcgatgaggctttggggtttggttgtttgccatcacacttcttctcgctgcataccgtttccgctaaggtatgcttgtgagtttttgatgcaggctttcggtttacagttaaacatggaattgcagttagctttgcaaatgtcagagaaacgcgttttgagaacgcagacactgttatgtgatatgcttctgcgtgactcgcctgctggaattgttacacagagtcccagtatcatggacttagtgaaatgtgacggtgcagcatttctttaccacgggaagtattacccgttgggtgttgctcctagtgaagttcagataaaagatgttgtggagtggttgcttgcgaatcatgcggattcaaccggattaagcactgatagtttaggcgatgcggggtatcccggtgcagctgcgttaggggatgctgtgtgcggtatggcagttgcatatatcacaaaaagagactttcttttttggtttcgatctcacactgcgaaagaaatcaaatggggaggcgctaagcatcatccggaggataaagatgatgggcaacgaatgcatcctcgttcgtcctttcaggcttttcttgaagttgttaagagccggagtcagccatgggaaactgcggaaatggatgcgattcactcgctccagcttattctgagagactcttttaaagaatctgaggcggctatgaactctaaagttgtggatggtgtggttcagccatgtagggatatggcgggggaacaggggattgatgagttaggtgcagttgcaagagagatggttaggctcattgagactgcaactgttcctatattcgctgtggatgccggaggctgcatcaatggatggaacgctaagattgcagagttgacaggtctctcagttgaagaagctatggggaagtctctggtttctgatttaatatacaaagagaatgaagcaactgtcaataagcttctttctcgtgctttgagaggggacgaggaaaagaatgtggaggttaagctgaaaactttcagccccgaactacaagggaaagcagtttttgtggttgtgaatgcttgttccagcaaggactacttgaacaacattgtcggcgtttgttttgttggacaagacgttactagtcagaaaatcgtaatggataagttcatcaacatacaaggagattacaaggctattgtacatagcccaaaccctctaatcccgccaatttttgctgctgacgagaacacgtgctgcctggaatggaacatggcgatggaaaagcttacgggttggtctcgcagtgaagtgattgggaaaatgattgtcggggaagtgtttgggagctgttgcatgctaaagggtcctgatgctttaaccaagttcatgattgtattgcataatgcgattggtggccaagatacggataagttccctttcccattctttgaccgcaatgggaagtttgttcaggctctattgactgcaaacaagcgggttagcctcgagggaaaggttattggggctttctgtttcttgcaaatcccgagccctgagctgcagcaagctttagcagtccaacggaggcaggacacagagtgtttcacgaaggcaaaagagttggcttatatttgtcaggtgataaagaatcctttgagcggtatgcgtttcgcaaactcattgttggaggccacagacttgaacgaggaccagaagcagttacttgaaacaagtgtttcttgcgagaaacagatctcaaggatcgtcggggacatggatcttgaaagcattgaagacggttcatttgtgctaaagagggaagagtttttccttggaagtgtcataaacgcgattgtaagtcaagcgatgttcttattaagggacagaggtcttcagctgatccgtgacattcccgaagagatcaaatcaatagaggtttttggagaccagataaggattcaacagctcctggctgagtttctgctgagtataatccggtatgcaccatctcaagagtgggtggagatccatttaagccaactttcaaagcaaatggctgatggattcgccgccatccgcacagaattcagaatggcgtgtccaggtgaaggtctgcctccagagctagtccgagacatgttccatagcagcaggtggacaagccctgaaggtttaggtctaagcgtatgtcgaaagattttaaagctaatgaacggtgaggttcaatacatccgagaatcagaacggtcctatttcctcatcattctggaactccctgtacctcgaaagcgaccattgtcaactgctagtggaagtggtgacatgatgctgatgatgccatattagatggtttccggagtcgggggtagtggcggtggccgtggcggtggccgtggcggagaagaagaaccgtcgtcaagtcacactcctaataaccgaagaggaggagaacaagctcaatcgtcgggaacgaaatctctcagaccaagaagcaacactgaatcaatgagcaaagcaattcaacagtacaccgtcgacgcaagactccacgccgttttcgaacaatccggcgaatcagggaaatcattcgactactcacaatcactcaaaacgacgacgtacggttcctctgtacctgagcaacagatcacagcttatctctctcgaatccagcgaggtggttacattcagcctttcggatgtatgatcgccgtcgatgaatccagtttccggatcatcggttacagtgaaaacgccagagaaatgttagggattatgcctcaatctgttcctactcttgagaaacctgagattctagctatgggaactgatgtgagatctttgttcacttcttcgagctcgattctactcgagcgtgctttcgttgctcgagagattaccttgttaaatccggtttggatccattccaagaatactggtaaaccgttttacgccattcttcataggattgatgttggtgttgttattgatttagagccagctagaactgaagatcctgcgctttctattgctggtgctgttcaatcgcagaaactcgcggttcgtgcgatttctcagttacaggctcttcctggtggagatattaagcttttgtgtgacactgtcgtggaaagtgtgagggacttgactggttatgatcgtgttatggtttataagtttcatgaagatgagcatggagaagttgtagctgagagtaaacgagatgatttagagccttatattggactgcatgttcctgctactgatattcctcaagcgtcaaggttcttgtttaagcagaaccgtgtccgaatgatagtagattgcaatgccacacctgttcttgtggtccaggacgataggctaactcagtctatgtgcttggttggttctactcttagggctcctcatggttgtcactctcagtatatggctaacatgggatctattgcgtctttagcaatggcggttataatcaatggaaatgaagatgatgggagcaatgtagctagtggaagaagctcgatgaggctttggggtttggttgtttgccatcacacttcttctcgctgcataccgtttccgctaaggtatgcttgtgagtttttgatgcaggctttcggtttacagttaaacatggaattgcagttagctttgcaaatgtcagagaaacgcgttttgagaacgcagacactgttatgtgatatgcttctgcgtgactcgcctgctggaattgttacacagagtcccagtatcatggacttagtgaaatgtgacggtgcagcatttctttaccacgggaagtattacccgttgggtgttgctcctagtgaagttcagataaaagatgttgtggagtggttgcttgcgaatcatgcggattcaaccggattaagcactgatagtttaggcgatgcggggtatcccggtgcagctgcgttaggggatgctgtgtgcggtatggcagttgcatatatcacaaaaagagactttcttttttggtttcgatctcacactgcgaaagaaatcaaatggggaggcgctaagcatcatccggaggataaagatgatgggcaacgaatgcatcctcgttcgtcctttcaggcttttcttgaagttgttaagagccggagtcagccatgggaaactgcggaaatggatgcgattcactcgctccagcttattctgagagactcttttaaagaatctgaggcggctatgaactctaaagttgtggatggtgtggttcagccatgtagggatatggcgggggaacaggggattgatgagttaggtgcagttgcaagagagatggttaggctcattgagactgcaactgttcctatattcgctgtggatgccggaggctgcatcaatggatggaacgctaagattgcagagttgacaggtctctcagttgaagaagctatggggaagtctctggtttctgatttaatatacaaagagaatgaagcaactgtcaataagcttctttctcgtgctttgagaggggacgaggaaaagaatgtggaggttaagctgaaaactttcagccccgaactacaagggaaagcagtttttgtggttgtgaatgcttgttccagcaaggactacttgaacaacattgtcggcgtttgttttgttggacaagacgttactagtcagaaaatcgtaatggataagttcatcaacatacaaggagattacaaggctattgtacatagcccaaaccctctaatcccgccaatttttgctgctgacgagaacacgtgctgcctggaatggaacatggcgatggaaaagcttacgggttggtctcgcagtgaagtgattgggaaaatgattgtcggggaagtgtttgggagctgttgcatgctaaagggtcctgatgctttaaccaagttcatgattgtattgcataatgcgattggtggccaagatacggataagttccctttcccattctttgaccgcaatgggaagtttgttcaggctctattgactgcaaacaagcgggttagcctcgagggaaaggttattggggctttctgtttcttgcaaatcccgagccctgagctgcagcaagctttagcagtccaacggaggcaggacacagagtgtttcacgaaggcaaaagagttggcttatatttgtcaggtgataaagaatcctttgagcggtatgcgtttcgcaaactcattgttggaggccacagacttgaacgaggaccagaagcagttacttgaaacaagtgtttcttgcgagaaacagatctcaaggatcgtcggggacatggatcttgaaagcattgaagacggttcatttgtgctaaagagggaagagtttttccttggaagtgtcataaacgcgattgtaagtcaagcgatgttcttattaagggacagaggtcttcagctgatccgtgacattcccgaagagatcaaatcaatagaggtttttggagaccagataaggattcaacagctcctggctgagtttctgctgagtataatccggtatgcaccatctcaagagtgggtggagatccatttaagccaactttcaaagcaaatggctgatggattcgccgccatccgcacagaattcagaatggcgtgtccaggtgaaggtctgcctccagagctagtccgagacatgttccatagcagcaggtggacaagccctgaaggtttaggtctaagcgtatgtcgaaagattttaaagctaatgaacggtgaggttcaatacatccgagaatcagaacggtcctatttcctcatcattctggaactccctgtacctcgaaagcgaccattgtcaactgctagtggaagtggtgacatgatgctgatgatgccatattagatggtttccggagtcgggggtagtggcggtggccgtggcggtggccgtggcggagaagaagaaccgtcgtcaagtcacactcctaataaccgaagaggaggagaacaagctcaatcgtcgggaacgaaatctctcagaccaagaagcaacactgaatcaatgagcaaagcaattcaacagtacaccgtcgacgcaagactccacgccgttttcgaacaatccggcgaatcagggaaatcattcgactactcacaatcactcaaaacgacgacgtacggttcctctgtacctgagcaacagatcacagcttatctctctcgaatccagcgaggtggttacattcagcctttcggatgtatgatcgccgtcgatgaatccagtttccggatcatcggttacagtgaaaacgccagagaaatgttagggattatgcctcaatctgttcctactcttgagaaacctgagattctagctatgggaactgatgtgagatctttgttcacttcttcgagctcgattctactcgagcgtgctttcgttgctcgagagattaccttgttaaatccggtttggatccattccaagaatactggtaaaccgttttacgccattcttcataggattgatgttggtgttgttattgatttagagccagctagaactgaagatcctgcgctttctattgctggtgctgttcaatcgcagaaactcgcggttcgtgcgatttctcagttacaggctcttcctggtggagatattaagcttttgtgtgacactgtcgtggaaagtgtgagggacttgactggttatgatcgtgttatggtttataagtttcatgaagatgagcatggagaagttgtagctgagagtaaacgagatgatttagagccttatattggactgcatgttcctgctactgatattcctcaagcgtcaaggttcttgtttaagcagaaccgtgtccgaatgatagtagattgcaatgccacacctgttcttgtggtccaggacgataggctaactcagtctatgtgcttggttggttctactcttagggctcctcatggttgtcactctcagtatatggctaacatgggatctattgcgtctttagcaatggcggttataatcaatggaaatgaagatgatgggagcaatgtagctagtggaagaagctcgatgaggctttggggtttggttgtttgccatcacacttcttctcgctgcataccgtttccgctaaggtatgcttgtgagtttttgatgcaggctttcggtttacagttaaacatggaattgcagttagctttgcaaatgtcagagaaacgcgttttgagaacgcagacactgttatgtgatatgcttctgcgtgactcgcctgctggaattgttacacagagtcccagtatcatggacttagtgaaatgtgacggtgcagcatttctttaccacgggaagtattacccgttgggtgttgctcctagtgaagttcagataaaagatgttgtggagtggttgcttgcgaatcatgcggattcaaccggattaagcactgatagtttaggcgatgcggggtatcccggtgcagctgcgttaggggatgctgtgtgcggtatggcagttgcatatatcacaaaaagagactttcttttttggtttcgatctcacactgcgaaagaaatcaaatggggaggcgctaagcatcatccggaggataaagatgatgggcaacgaatgcatcctcgttcgtcctttcaggcttttcttgaagttgttaagagccggagtcagccatgggaaactgcggaaatggatgcgattcactcgctccagcttattctgagagactcttttaaagaatctgaggcggctatgaactctaaagttgtggatggtgtggttcagccatgtagggatatggcgggggaacaggggattgatgagttaggtgcagttgcaagagagatggttaggctcattgagactgcaactgttcctatattcgctgtggatgccggaggctgcatcaatggatggaacgctaagattgcagagttgacaggtctctcagttgaagaagctatggggaagtctctggtttctgatttaatatacaaagagaatgaagcaactgtcaataagcttctttctcgtgctttgagaggggacgaggaaaagaatgtggaggttaagctgaaaactttcagccccgaactacaagggaaagcagtttttgtggttgtgaatgcttgttccagcaaggactacttgaacaacattgtcggcgtttgttttgttggacaagacgttactagtcagaaaatcgtaatggataagttcatcaacatacaaggagattacaaggctattgtacatagcccaaaccctctaatcccgccaatttttgctgctgacgagaacacgtgctgcctggaatggaacatggcgatggaaaagcttacgggttggtctcgcagtgaagtgattgggaaaatgattgtcggggaagtgtttgggagctgttgcatgctaaagggtcctgatgctttaaccaagttcatgattgtattgcataatgcgattggtggccaagatacggataagttccctttcccattctttgaccgcaatgggaagtttgttcaggctctattgactgcaaacaagcgggttagcctcgagggaaaggttattggggctttctgtttcttgcaaatcccgagccctgagctgcagcaagctttagcagtccaacggaggcaggacacagagtgtttcacgaaggcaaaagagttggcttatatttgtcaggtgataaagaatcctttgagcggtatgcgtttcgcaaactcattgttggaggccacagacttgaacgaggaccagaagcagttacttgaaacaagtgtttcttgcgagaaacagatctcaaggatcgtcggggacatggatcttgaaagcattgaagacggttcatttgtgctaaagagggaagagtttttccttggaagtgtcataaacgcgattgtaagtcaagcgatgttcttattaagggacagaggtcttcagctgatccgtgacattcccgaagagatcaaatcaatagaggtttttggagaccagataaggattcaacagctcctggctgagtttctgctgagtataatccggtatgcaccatctcaagagtgggtggagatccatttaagccaactttcaaagcaaatggctgatggattcgccgccatccgcacagaattcagaatggcgtgtccaggtgaaggtctgcctccagagctagtccgagacatgttccatagcagcaggtggacaagccctgaaggtttaggtctaagcgtatgtcgaaagattttaaagctaatgaacggtgaggttcaatacatccgagaatcagaacggtcctatttcctcatcattctggaactccctgtacctcgaaagcgaccattgtcaactgctagtggaagtggtgacatgatgctgatgatgccatattagatggtttccggagtcgggggtagtggcggtggccgtggcggtggccgtggcggagaagaagaaccgtcgtcaagtcacactcctaataaccgaagaggaggagaacaagctcaatcgtcgggaacgaaatctctcagaccaagaagcaacactgaatcaatgagcaaagcaattcaacagtacaccgtcgacgcaagactccacgccgttttcgaacaatccggcgaatcagggaaatcattcgactactcacaatcactcaaaacgacgacgtacggttcctctgtacctgagcaacagatcacagcttatctctctcgaatccagcgaggtggttacattcagcctttcggatgtatgatcgccgtcgatgaatccagtttccggatcatcggttacagtgaaaacgccagagaaatgttagggattatgcctcaatctgttcctactcttgagaaacctgagattctagctatgggaactgatgtgagatctttgttcacttcttcgagctcgattctactcgagcgtgctttcgttgctcgagagattaccttgttaaatccggtttggatccattccaagaatactggtaaaccgttttacgccattcttcataggattgatgttggtgttgttattgatttagagccagctagaactgaagatcctgcgctttctattgctggtgctgttcaatcgcagaaactcgcggttcgtgcgatttctcagttacaggctcttcctggtggagatattaagcttttgtgtgacactgtcgtggaaagtgtgagggacttgactggttatgatcgtgttatggtttataagtttcatgaagatgagcatggagaagttgtagctgagagtaaacgagatgatttagagccttatattggactgcatgttcctgctactgatattcctcaagcgtcaaggttcttgtttaagcagaaccgtgtccgaatgatagtagattgcaatgccacacctgttcttgtggtccaggacgataggctaactcagtctatgtgcttggttggttctactcttagggctcctcatggttgtcactctcagtatatggctaacatgggatctattgcgtctttagcaatggcggttataatcaatggaaatgaagatgatgggagcaatgtagctagtggaagaagctcgatgaggctttggggtttggttgtttgccatcacacttcttctcgctgcataccgtttccgctaaggtatgcttgtgagtttttgatgcaggctttcggtttacagttaaacatggaattgcagttagctttgcaaatgtcagagaaacgcgttttgagaacgcagacactgttatgtgatatgcttctgcgtgactcgcctgctggaattgttacacagagtcccagtatcatggacttagtgaaatgtgacggtgcagcatttctttaccacgggaagtattacccgttgggtgttgctcctagtgaagttcagataaaagatgttgtggagtggttgcttgcgaatcatgcggattcaaccggattaagcactgatagtttaggcgatgcggggtatcccggtgcagctgcgttaggggatgctgtgtgcggtatggcagttgcatatatcacaaaaagagactttcttttttggtttcgatctcacactgcgaaagaaatcaaatggggaggcgctaagcatcatccggaggataaagatgatgggcaacgaatgcatcctcgttcgtcctttcaggcttttcttgaagttgttaagagccggagtcagccatgggaaactgcggaaatggatgcgattcactcgctccagcttattctgagagactcttttaaagaatctgaggcggctatgaactctaaagttgtggatggtgtggttcagccatgtagggatatggcgggggaacaggggattgatgagttaggtgcagttgcaagagagatggttaggctcattgagactgcaactgttcctatattcgctgtggatgccggaggctgcatcaatggatggaacgctaagattgcagagttgacaggtctctcagttgaagaagctatggggaagtctctggtttctgatttaatatacaaagagaatgaagcaactgtcaataagcttctttctcgtgctttgagaggggacgaggaaaagaatgtggaggttaagctgaaaactttcagccccgaactacaagggaaagcagtttttgtggttgtgaatgcttgttccagcaaggactacttgaacaacattgtcggcgtttgttttgttggacaagacgttactagtcagaaaatcgtaatggataagttcatcaacatacaaggagattacaaggctattgtacatagcccaaaccctctaatcccgccaatttttgctgctgacgagaacacgtgctgcctggaatggaacatggcgatggaaaagcttacgggttggtctcgcagtgaagtgattgggaaaatgattgtcggggaagtgtttgggagctgttgcatgctaaagggtcctgatgctttaaccaagttcatgattgtattgcataatgcgattggtggccaagatacggataagttccctttcccattctttgaccgcaatgggaagtttgttcaggctctattgactgcaaacaagcgggttagcctcgagggaaaggttattggggctttctgtttcttgcaaatcccgagccctgagctgcagcaagctttagcagtccaacggaggcaggacacagagtgtttcacgaaggcaaaagagttggcttatatttgtcaggtgataaagaatcctttgagcggtatgcgtttcgcaaactcattgttggaggccacagacttgaacgaggaccagaagcagttacttgaaacaagtgtttcttgcgagaaacagatctcaaggatcgtcggggacatggatcttgaaagcattgaagacggttcatttgtgctaaagagggaagagtttttccttggaagtgtcataaacgcgattgtaagtcaagcgatgttcttattaagggacagaggtcttcagctgatccgtgacattcccgaagagatcaaatcaatagaggtttttggagaccagataaggattcaacagctcctggctgagtttctgctgagtataatccggtatgcaccatctcaagagtgggtggagatccatttaagccaactttcaaagcaaatggctgatggattcgccgccatccgcacagaattcagaatggcgtgtccaggtgaaggtctgcctccagagctagtccgagacatgttccatagcagcaggtggacaagccctgaaggtttaggtctaagcgtatgtcgaaagattttaaagctaatgaacggtgaggttcaatacatccgagaatcagaacggtcctatttcctcatcattctggaactccctgtacctcgaaagcgaccattgtcaactgctagtggaagtggtgacatgatgctgatgatgccatattagatggtttccggagtcgggggtagtggcggtggccgtggcggtggccgtggcggagaagaagaaccgtcgtcaagtcacactcctaataaccgaagaggaggagaacaagctcaatcgtcgggaacgaaatctctcagaccaagaagcaacactgaatcaatgagcaaagcaattcaacagtacaccgtcgacgcaagactccacgccgttttcgaacaatccggcgaatcagggaaatcattcgactactcacaatcactcaaaacgacgacgtacggttcctctgtacctgagcaacagatcacagcttatctctctcgaatccagcgaggtggttacattcagcctttcggatgtatgatcgccgtcgatgaatccagtttccggatcatcggttacagtgaaaacgccagagaaatgttagggattatgcctcaatctgttcctactcttgagaaacctgagattctagctatgggaactgatgtgagatctttgttcacttcttcgagctcgattctactcgagcgtgctttcgttgctcgagagattaccttgttaaatccggtttggatccattccaagaatactggtaaaccgttttacgccattcttcataggattgatgttggtgttgttattgatttagagccagctagaactgaagatcctgcgctttctattgctggtgctgttcaatcgcagaaactcgcggttcgtgcgatttctcagttacaggctcttcctggtggagatattaagcttttgtgtgacactgtcgtggaaagtgtgagggacttgactggttatgatcgtgttatggtttataagtttcatgaagatgagcatggagaagttgtagctgagagtaaacgagatgatttagagccttatattggactgcatgttcctgctactgatattcctcaagcgtcaaggttcttgtttaagcagaaccgtgtccgaatgatagtagattgcaatgccacacctgttcttgtggtccaggacgataggctaactcagtctatgtgcttggttggttctactcttagggctcctcatggttgtcactctcagtatatggctaacatgggatctattgcgtctttagcaatggcggttataatcaatggaaatgaagatgatgggagcaatgtagctagtggaagaagctcgatgaggctttggggtttggttgtttgccatcacacttcttctcgctgcataccgtttccgctaaggtatgcttgtgagtttttgatgcaggctttcggtttacagttaaacatggaattgcagttagctttgcaaatgtcagagaaacgcgttttgagaacgcagacactgttatgtgatatgcttctgcgtgactcgcctgctggaattgttacacagagtcccagtatcatggacttagtgaaatgtgacggtgcagcatttctttaccacgggaagtattacccgttgggtgttgctcctagtgaagttcagataaaagatgttgtggagtggttgcttgcgaatcatgcggattcaaccggattaagcactgatagtttaggcgatgcggggtatcccggtgcagctgcgttaggggatgctgtgtgcggtatggcagttgcatatatcacaaaaagagactttcttttttggtttcgatctcacactgcgaaagaaatcaaatggggaggcgctaagcatcatccggaggataaagatgatgggcaacgaatgcatcctcgttcgtcctttcaggcttttcttgaagttgttaagagccggagtcagccatgggaaactgcggaaatggatgcgattcactcgctccagcttattctgagagactcttttaaagaatctgaggcggctatgaactctaaagttgtggatggtgtggttcagccatgtagggatatggcgggggaacaggggattgatgagttaggtgcagttgcaagagagatggttaggctcattgagactgcaactgttcctatattcgctgtggatgccggaggctgcatcaatggatggaacgctaagattgcagagttgacaggtctctcagttgaagaagctatggggaagtctctggtttctgatttaatatacaaagagaatgaagcaactgtcaataagcttctttctcgtgctttgagaggggacgaggaaaagaatgtggaggttaagctgaaaactttcagccccgaactacaagggaaagcagtttttgtggttgtgaatgcttgttccagcaaggactacttgaacaacattgtcggcgtttgttttgttggacaagacgttactagtcagaaaatcgtaatggataagttcatcaacatacaaggagattacaaggctattgtacatagcccaaaccctctaatcccgccaatttttgctgctgacgagaacacgtgctgcctggaatggaacatggcgatggaaaagcttacgggttggtctcgcagtgaagtgattgggaaaatgattgtcggggaagtgtttgggagctgttgcatgctaaagggtcctgatgctttaaccaagttcatgattgtattgcataatgcgattggtggccaagatacggataagttccctttcccattctttgaccgcaatgggaagtttgttcaggctctattgactgcaaacaagcgggttagcctcgagggaaaggttattggggctttctgtttcttgcaaatcccgagccctgagctgcagcaagctttagcagtccaacggaggcaggacacagagtgtttcacgaaggcaaaagagttggcttatatttgtcaggtgataaagaatcctttgagcggtatgcgtttcgcaaactcattgttggaggccacagacttgaacgaggaccagaagcagttacttgaaacaagtgtttcttgcgagaaacagatctcaaggatcgtcggggacatggatcttgaaagcattgaagacggttcatttgtgctaaagagggaagagtttttccttggaagtgtcataaacgcgattgtaagtcaagcgatgttcttattaagggacagaggtcttcagctgatccgtgacattcccgaagagatcaaatcaatagaggtttttggagaccagataaggattcaacagctcctggctgagtttctgctgagtataatccggtatgcaccatctcaagagtgggtggagatccatttaagccaactttcaaagcaaatggctgatggattcgccgccatccgcacagaattcagaatggcgtgtccaggtgaaggtctgcctccagagctagtccgagacatgttccatagcagcaggtggacaagccctgaaggtttaggtctaagcgtatgtcgaaagattttaaagctaatgaacggtgaggttcaatacatccgagaatcagaacggtcctatttcctcatcattctggaactccctgtacctcgaaagcgaccattgtcaactgctagtggaagtggtgacatgatgctgatgatgccatattagatggtttccggagtcgggggtagtggcggtggccgtggcggtggccgtggcggagaagaagaaccgtcgtcaagtcacactcctaataaccgaagaggaggagaacaagctcaatcgtcgggaacgaaatctctcagaccaagaagcaacactgaatcaatgagcaaagcaattcaacagtacaccgtcgacgcaagactccacgccgttttcgaacaatccggcgaatcagggaaatcattcgactactcacaatcactcaaaacgacgacgtacggttcctctgtacctgagcaacagatcacagcttatctctctcgaatccagcgaggtggttacattcagcctttcggatgtatgatcgccgtcgatgaatccagtttccggatcatcggttacagtgaaaacgccagagaaatgttagggattatgcctcaatctgttcctactcttgagaaacctgagattctagctatgggaactgatgtgagatctttgttcacttcttcgagctcgattctactcgagcgtgctttcgttgctcgagagattaccttgttaaatccggtttggatccattccaagaatactggtaaaccgttttacgccattcttcataggattgatgttggtgttgttattgatttagagccagctagaactgaagatcctgcgctttctattgctggtgctgttcaatcgcagaaactcgcggttcgtgcgatttctcagttacaggctcttcctggtggagatattaagcttttgtgtgacactgtcgtggaaagtgtgagggacttgactggttatgatcgtgttatggtttataagtttcatgaagatgagcatggagaagttgtagctgagagtaaacgagatgatttagagccttatattggactgcatgttcctgctactgatattcctcaagcgtcaaggttcttgtttaagcagaaccgtgtccgaatgatagtagattgcaatgccacacctgttcttgtggtccaggacgataggctaactcagtctatgtgcttggttggttctactcttagggctcctcatggttgtcactctcagtatatggctaacatgggatctattgcgtctttagcaatggcggttataatcaatggaaatgaagatgatgggagcaatgtagctagtggaagaagctcgatgaggctttggggtttggttgtttgccatcacacttcttctcgctgcataccgtttccgctaaggtatgcttgtgagtttttgatgcaggctttcggtttacagttaaacatggaattgcagttagctttgcaaatgtcagagaaacgcgttttgagaacgcagacactgttatgtgatatgcttctgcgtgactcgcctgctggaattgttacacagagtcccagtatcatggacttagtgaaatgtgacggtgcagcatttctttaccacgggaagtattacccgttgggtgttgctcctagtgaagttcagataaaagatgttgtggagtggttgcttgcgaatcatgcggattcaaccggattaagcactgatagtttaggcgatgcggggtatcccggtgcagctgcgttaggggatgctgtgtgcggtatggcagttgcatatatcacaaaaagagactttcttttttggtttcgatctcacactgcgaaagaaatcaaatggggaggcgctaagcatcatccggaggataaagatgatgggcaacgaatgcatcctcgttcgtcctttcaggcttttcttgaagttgttaagagccggagtcagccatgggaaactgcggaaatggatgcgattcactcgctccagcttattctgagagactcttttaaagaatctgaggcggctatgaactctaaagttgtggatggtgtggttcagccatgtagggatatggcgggggaacaggggattgatgagttaggtgcagttgcaagagagatggttaggctcattgagactgcaactgttcctatattcgctgtggatgccggaggctgcatcaatggatggaacgctaagattgcagagttgacaggtctctcagttgaagaagctatggggaagtctctggtttctgatttaatatacaaagagaatgaagcaactgtcaataagcttctttctcgtgctttgagaggggacgaggaaaagaatgtggaggttaagctgaaaactttcagccccgaactacaagggaaagcagtttttgtggttgtgaatgcttgttccagcaaggactacttgaacaacattgtcggcgtttgttttgttggacaagacgttactagtcagaaaatcgtaatggataagttcatcaacatacaaggagattacaaggctattgtacatagcccaaaccctctaatcccgccaatttttgctgctgacgagaacacgtgctgcctggaatggaacatggcgatggaaaagcttacgggttggtctcgcagtgaagtgattgggaaaatgattgtcggggaagtgtttgggagctgttgcatgctaaagggtcctgatgctttaaccaagttcatgattgtattgcataatgcgattggtggccaagatacggataagttccctttcccattctttgaccgcaatgggaagtttgttcaggctctattgactgcaaacaagcgggttagcctcgagggaaaggttattggggctttctgtttcttgcaaatcccgagccctgagctgcagcaagctttagcagtccaacggaggcaggacacagagtgtttcacgaaggcaaaagagttggcttatatttgtcaggtgataaagaatcctttgagcggtatgcgtttcgcaaactcattgttggaggccacagacttgaacgaggaccagaagcagttacttgaaacaagtgtttcttgcgagaaacagatctcaaggatcgtcggggacatggatcttgaaagcattgaagacggttcatttgtgctaaagagggaagagtttttccttggaagtgtcataaacgcgattgtaagtcaagcgatgttcttattaagggacagaggtcttcagctgatccgtgacattcccgaagagatcaaatcaatagaggtttttggagaccagataaggattcaacagctcctggctgagtttctgctgagtataatccggtatgcaccatctcaagagtgggtggagatccatttaagccaactttcaaagcaaatggctgatggattcgccgccatccgcacagaattcagaatggcgtgtccaggtgaaggtctgcctccagagctagtccgagacatgttccatagcagcaggtggacaagccctgaaggtttaggtctaagcgtatgtcgaaagattttaaagctaatgaacggtgaggttcaatacatccgagaatcagaacggtcctatttcctcatcattctggaactccctgtacctcgaaagcgaccattgtcaactgctagtggaagtggtgacatgatgctgatgatgccatattagatggtttccggagtcgggggtagtggcggtggccgtggcggtggccgtggcggagaagaagaaccgtcgtcaagtcacactcctaataaccgaagaggaggagaacaagctcaatcgtcgggaacgaaatctctcagaccaagaagcaacactgaatcaatgagcaaagcaattcaacagtacaccgtcgacgcaagactccacgccgttttcgaacaatccggcgaatcagggaaatcattcgactactcacaatcactcaaaacgacgacgtacggttcctctgtacctgagcaacagatcacagcttatctctctcgaatccagcgaggtggttacattcagcctttcggatgtatgatcgccgtcgatgaatccagtttccggatcatcggttacagtgaaaacgccagagaaatgttagggattatgcctcaatctgttcctactcttgagaaacctgagattctagctatgggaactgatgtgagatctttgttcacttcttcgagctcgattctactcgagcgtgctttcgttgctcgagagattaccttgttaaatccggtttggatccattccaagaatactggtaaaccgttttacgccattcttcataggattgatgttggtgttgttattgatttagagccagctagaactgaagatcctgcgctttctattgctggtgctgttcaatcgcagaaactcgcggttcgtgcgatttctcagttacaggctcttcctggtggagatattaagcttttgtgtgacactgtcgtggaaagtgtgagggacttgactggttatgatcgtgttatggtttataagtttcatgaagatgagcatggagaagttgtagctgagagtaaacgagatgatttagagccttatattggactgcatgttcctgctactgatattcctcaagcgtcaaggttcttgtttaagcagaaccgtgtccgaatgatagtagattgcaatgccacacctgttcttgtggtccaggacgataggctaactcagtctatgtgcttggttggttctactcttagggctcctcatggttgtcactctcagtatatggctaacatgggatctattgcgtctttagcaatggcggttataatcaatggaaatgaagatgatgggagcaatgtagctagtggaagaagctcgatgaggctttggggtttggttgtttgccatcacacttcttctcgctgcataccgtttccgctaaggtatgcttgtgagtttttgatgcaggctttcggtttacagttaaacatggaattgcagttagctttgcaaatgtcagagaaacgcgttttgagaacgcagacactgttatgtgatatgcttctgcgtgactcgcctgctggaattgttacacagagtcccagtatcatggacttagtgaaatgtgacggtgcagcatttctttaccacgggaagtattacccgttgggtgttgctcctagtgaagttcagataaaagatgttgtggagtggttgcttgcgaatcatgcggattcaaccggattaagcactgatagtttaggcgatgcggggtatcccggtgcagctgcgttaggggatgctgtgtgcggtatggcagttgcatatatcacaaaaagagactttcttttttggtttcgatctcacactgcgaaagaaatcaaatggggaggcgctaagcatcatccggaggataaagatgatgggcaacgaatgcatcctcgttcgtcctttcaggcttttcttgaagttgttaagagccggagtcagccatgggaaactgcggaaatggatgcgattcactcgctccagcttattctgagagactcttttaaagaatctgaggcggctatgaactctaaagttgtggatggtgtggttcagccatgtagggatatggcgggggaacaggggattgatgagttaggtgcagttgcaagagagatggttaggctcattgagactgcaactgttcctatattcgctgtggatgccggaggctgcatcaatggatggaacgctaagattgcagagttgacaggtctctcagttgaagaagctatggggaagtctctggtttctgatttaatatacaaagagaatgaagcaactgtcaataagcttctttctcgtgctttgagaggggacgaggaaaagaatgtggaggttaagctgaaaactttcagccccgaactacaagggaaagcagtttttgtggttgtgaatgcttgttccagcaaggactacttgaacaacattgtcggcgtttgttttgttggacaagacgttactagtcagaaaatcgtaatggataagttcatcaacatacaaggagattacaaggctattgtacatagcccaaaccctctaatcccgccaatttttgctgctgacgagaacacgtgctgcctggaatggaacatggcgatggaaaagcttacgggttggtctcgcagtgaagtgattgggaaaatgattgtcggggaagtgtttgggagctgttgcatgctaaagggtcctgatgctttaaccaagttcatgattgtattgcataatgcgattggtggccaagatacggataagttccctttcccattctttgaccgcaatgggaagtttgttcaggctctattgactgcaaacaagcgggttagcctcgagggaaaggttattggggctttctgtttcttgcaaatcccgagccctgagctgcagcaagctttagcagtccaacggaggcaggacacagagtgtttcacgaaggcaaaagagttggcttatatttgtcaggtgataaagaatcctttgagcggtatgcgtttcgcaaactcattgttggaggccacagacttgaacgaggaccagaagcagttacttgaaacaagtgtttcttgcgagaaacagatctcaaggatcgtcggggacatggatcttgaaagcattgaagacggttcatttgtgctaaagagggaagagtttttccttggaagtgtcataaacgcgattgtaagtcaagcgatgttcttattaagggacagaggtcttcagctgatccgtgacattcccgaagagatcaaatcaatagaggtttttggagaccagataaggattcaacagctcctggctgagtttctgctgagtataatccggtatgcaccatctcaagagtgggtggagatccatttaagccaactttcaaagcaaatggctgatggattcgccgccatccgcacagaattcagaatggcgtgtccaggtgaaggtctgcctccagagctagtccgagacatgttccatagcagcaggtggacaagccctgaaggtttaggtctaagcgtatgtcgaaagattttaaagctaatgaacggtgaggttcaatacatccgagaatcagaacggtcctatttcctcatcattctggaactccctgtacctcgaaagcgaccattgtcaactgctagtggaagtggtgacatgatgctgatgatgccatattagatggtttccggagtcgggggtagtggcggtggccgtggcggtggccgtggcggagaagaagaaccgtcgtcaagtcacactcctaataaccgaagaggaggagaacaagctcaatcgtcgggaacgaaatctctcagaccaagaagcaacactgaatcaatgagcaaagcaattcaacagtacaccgtcgacgcaagactccacgccgttttcgaacaatccggcgaatcagggaaatcattcgactactcacaatcactcaaaacgacgacgtacggttcctctgtacctgagcaacagatcacagcttatctctctcgaatccagcgaggtggttacattcagcctttcggatgtatgatcgccgtcgatgaatccagtttccggatcatcggttacagtgaaaacgccagagaaatgttagggattatgcctcaatctgttcctactcttgagaaacctgagattctagctatgggaactgatgtgagatctttgttcacttcttcgagctcgattctactcgagcgtgctttcgttgctcgagagattaccttgttaaatccggtttggatccattccaagaatactggtaaaccgttttacgccattcttcataggattgatgttggtgttgttattgatttagagccagctagaactgaagatcctgcgctttctattgctggtgctgttcaatcgcagaaactcgcggttcgtgcgatttctcagttacaggctcttcctggtggagatattaagcttttgtgtgacactgtcgtggaaagtgtgagggacttgactggttatgatcgtgttatggtttataagtttcatgaagatgagcatggagaagttgtagctgagagtaaacgagatgatttagagccttatattggactgcatgttcctgctactgatattcctcaagcgtcaaggttcttgtttaagcagaaccgtgtccgaatgatagtagattgcaatgccacacctgttcttgtggtccaggacgataggctaactcagtctatgtgcttggttggttctactcttagggctcctcatggttgtcactctcagtatatggctaacatgggatctattgcgtctttagcaatggcggttataatcaatggaaatgaagatgatgggagcaatgtagctagtggaagaagctcgatgaggctttggggtttggttgtttgccatcacacttcttctcgctgcataccgtttccgctaaggtatgcttgtgagtttttgatgcaggctttcggtttacagttaaacatggaattgcagttagctttgcaaatgtcagagaaacgcgttttgagaacgcagacactgttatgtgatatgcttctgcgtgactcgcctgctggaattgttacacagagtcccagtatcatggacttagtgaaatgtgacggtgcagcatttctttaccacgggaagtattacccgttgggtgttgctcctagtgaagttcagataaaagatgttgtggagtggttgcttgcgaatcatgcggattcaaccggattaagcactgatagtttaggcgatgcggggtatcccggtgcagctgcgttaggggatgctgtgtgcggtatggcagttgcatatatcacaaaaagagactttcttttttggtttcgatctcacactgcgaaagaaatcaaatggggaggcgctaagcatcatccggaggataaagatgatgggcaacgaatgcatcctcgttcgtcctttcaggcttttcttgaagttgttaagagccggagtcagccatgggaaactgcggaaatggatgcgattcactcgctccagcttattctgagagactcttttaaagaatctgaggcggctatgaactctaaagttgtggatggtgtggttcagccatgtagggatatggcgggggaacaggggattgatgagttaggtgcagttgcaagagagatggttaggctcattgagactgcaactgttcctatattcgctgtggatgccggaggctgcatcaatggatggaacgctaagattgcagagttgacaggtctctcagttgaagaagctatggggaagtctctggtttctgatttaatatacaaagagaatgaagcaactgtcaataagcttctttctcgtgctttgagaggggacgaggaaaagaatgtggaggttaagctgaaaactttcagccccgaactacaagggaaagcagtttttgtggttgtgaatgcttgttccagcaaggactacttgaacaacattgtcggcgtttgttttgttggacaagacgttactagtcagaaaatcgtaatggataagttcatcaacatacaaggagattacaaggctattgtacatagcccaaaccctctaatcccgccaatttttgctgctgacgagaacacgtgctgcctggaatggaacatggcgatggaaaagcttacgggttggtctcgcagtgaagtgattgggaaaatgattgtcggggaagtgtttgggagctgttgcatgctaaagggtcctgatgctttaaccaagttcatgattgtattgcataatgcgattggtggccaagatacggataagttccctttcccattctttgaccgcaatgggaagtttgttcaggctctattgactgcaaacaagcgggttagcctcgagggaaaggttattggggctttctgtttcttgcaaatcccgagccctgagctgcagcaagctttagcagtccaacggaggcaggacacagagtgtttcacgaaggcaaaagagttggcttatatttgtcaggtgataaagaatcctttgagcggtatgcgtttcgcaaactcattgttggaggccacagacttgaacgaggaccagaagcagttacttgaaacaagtgtttcttgcgagaaacagatctcaaggatcgtcggggacatggatcttgaaagcattgaagacggttcatttgtgctaaagagggaagagtttttccttggaagtgtcataaacgcgattgtaagtcaagcgatgttcttattaagggacagaggtcttcagctgatccgtgacattcccgaagagatcaaatcaatagaggtttttggagaccagataaggattcaacagctcctggctgagtttctgctgagtataatccggtatgcaccatctcaagagtgggtggagatccatttaagccaactttcaaagcaaatggctgatggattcgccgccatccgcacagaattcagaatggcgtgtccaggtgaaggtctgcctccagagctagtccgagacatgttccatagcagcaggtggacaagccctgaaggtttaggtctaagcgtatgtcgaaagattttaaagctaatgaacggtgaggttcaatacatccgagaatcagaacggtcctatttcctcatcattctggaactccctgtacctcgaaagcgaccattgtcaactgctagtggaagtggtgacatgatgctgatgatgccatattagatggtttccggagtcgggggtagtggcggtggccgtggcggtggccgtggcggagaagaagaaccgtcgtcaagtcacactcctaataaccgaagaggaggagaacaagctcaatcgtcgggaacgaaatctctcagaccaagaagcaacactgaatcaatgagcaaagcaattcaacagtacaccgtcgacgcaagactccacgccgttttcgaacaatccggcgaatcagggaaatcattcgactactcacaatcactcaaaacgacgacgtacggttcctctgtacctgagcaacagatcacagcttatctctctcgaatccagcgaggtggttacattcagcctttcggatgtatgatcgccgtcgatgaatccagtttccggatcatcggttacagtgaaaacgccagagaaatgttagggattatgcctcaatctgttcctactcttgagaaacctgagattctagctatgggaactgatgtgagatctttgttcacttcttcgagctcgattctactcgagcgtgctttcgttgctcgagagattaccttgttaaatccggtttggatccattccaagaatactggtaaaccgttttacgccattcttcataggattgatgttggtgttgttattgatttagagccagctagaactgaagatcctgcgctttctattgctggtgctgttcaatcgcagaaactcgcggttcgtgcgatttctcagttacaggctcttcctggtggagatattaagcttttgtgtgacactgtcgtggaaagtgtgagggacttgactggttatgatcgtgttatggtttataagtttcatgaagatgagcatggagaagttgtagctgagagtaaacgagatgatttagagccttatattggactgcatgttcctgctactgatattcctcaagcgtcaaggttcttgtttaagcagaaccgtgtccgaatgatagtagattgcaatgccacacctgttcttgtggtccaggacgataggctaactcagtctatgtgcttggttggttctactcttagggctcctcatggttgtcactctcagtatatggctaacatgggatctattgcgtctttagcaatggcggttataatcaatggaaatgaagatgatgggagcaatgtagctagtggaagaagctcgatgaggctttggggtttggttgtttgccatcacacttcttctcgctgcataccgtttccgctaaggtatgcttgtgagtttttgatgcaggctttcggtttacagttaaacatggaattgcagttagctttgcaaatgtcagagaaacgcgttttgagaacgcagacactgttatgtgatatgcttctgcgtgactcgcctgctggaattgttacacagagtcccagtatcatggacttagtgaaatgtgacggtgcagcatttctttaccacgggaagtattacccgttgggtgttgctcctagtgaagttcagataaaagatgttgtggagtggttgcttgcgaatcatgcggattcaaccggattaagcactgatagtttaggcgatgcggggtatcccggtgcagctgcgttaggggatgctgtgtgcggtatggcagttgcatatatcacaaaaagagactttcttttttggtttcgatctcacactgcgaaagaaatcaaatggggaggcgctaagcatcatccggaggataaagatgatgggcaacgaatgcatcctcgttcgtcctttcaggcttttcttgaagttgttaagagccggagtcagccatgggaaactgcggaaatggatgcgattcactcgctccagcttattctgagagactcttttaaagaatctgaggcggctatgaactctaaagttgtggatggtgtggttcagccatgtagggatatggcgggggaacaggggattgatgagttaggtgcagttgcaagagagatggttaggctcattgagactgcaactgttcctatattcgctgtggatgccggaggctgcatcaatggatggaacgctaagattgcagagttgacaggtctctcagttgaagaagctatggggaagtctctggtttctgatttaatatacaaagagaatgaagcaactgtcaataagcttctttctcgtgctttgagaggggacgaggaaaagaatgtggaggttaagctgaaaactttcagccccgaactacaagggaaagcagtttttgtggttgtgaatgcttgttccagcaaggactacttgaacaacattgtcggcgtttgttttgttggacaagacgttactagtcagaaaatcgtaatggataagttcatcaacatacaaggagattacaaggctattgtacatagcccaaaccctctaatcccgccaatttttgctgctgacgagaacacgtgctgcctggaatggaacatggcgatggaaaagcttacgggttggtctcgcagtgaagtgattgggaaaatgattgtcggggaagtgtttgggagctgttgcatgctaaagggtcctgatgctttaaccaagttcatgattgtattgcataatgcgattggtggccaagatacggataagttccctttcccattctttgaccgcaatgggaagtttgttcaggctctattgactgcaaacaagcgggttagcctcgagggaaaggttattggggctttctgtttcttgcaaatcccgagccctgagctgcagcaagctttagcagtccaacggaggcaggacacagagtgtttcacgaaggcaaaagagttggcttatatttgtcaggtgataaagaatcctttgagcggtatgcgtttcgcaaactcattgttggaggccacagacttgaacgaggaccagaagcagttacttgaaacaagtgtttcttgcgagaaacagatctcaaggatcgtcggggacatggatcttgaaagcattgaagacggttcatttgtgctaaagagggaagagtttttccttggaagtgtcataaacgcgattgtaagtcaagcgatgttcttattaagggacagaggtcttcagctgatccgtgacattcccgaagagatcaaatcaatagaggtttttggagaccagataaggattcaacagctcctggctgagtttctgctgagtataatccggtatgcaccatctcaagagtgggtggagatccatttaagccaactttcaaagcaaatggctgatggattcgccgccatccgcacagaattcagaatggcgtgtccaggtgaaggtctgcctccagagctagtccgagacatgttccatagcagcaggtggacaagccctgaaggtttaggtctaagcgtatgtcgaaagattttaaagctaatgaacggtgaggttcaatacatccgagaatcagaacggtcctatttcctcatcattctggaactccctgtacctcgaaagcgaccattgtcaactgctagtggaagtggtgacatgatgctgatgatgccatattagatggtttccggagtcgggggtagtggcggtggccgtggcggtggccgtggcggagaagaagaaccgtcgtcaagtcacactcctaataaccgaagaggaggagaacaagctcaatcgtcgggaacgaaatctctcagaccaagaagcaacactgaatcaatgagcaaagcaattcaacagtacaccgtcgacgcaagactccacgccgttttcgaacaatccggcgaatcagggaaatcattcgactactcacaatcactcaaaacgacgacgtacggttcctctgtacctgagcaacagatcacagcttatctctctcgaatccagcgaggtggttacattcagcctttcggatgtatgatcgccgtcgatgaatccagtttccggatcatcggttacagtgaaaacgccagagaaatgttagggattatgcctcaatctgttcctactcttgagaaacctgagattctagctatgggaactgatgtgagatctttgttcacttcttcgagctcgattctactcgagcgtgctttcgttgctcgagagattaccttgttaaatccggtttggatccattccaagaatactggtaaaccgttttacgccattcttcataggattgatgttggtgttgttattgatttagagccagctagaactgaagatcctgcgctttctattgctggtgctgttcaatcgcagaaactcgcggttcgtgcgatttctcagttacaggctcttcctggtggagatattaagcttttgtgtgacactgtcgtggaaagtgtgagggacttgactggttatgatcgtgttatggtttataagtttcatgaagatgagcatggagaagttgtagctgagagtaaacgagatgatttagagccttatattggactgcatgttcctgctactgatattcctcaagcgtcaaggttcttgtttaagcagaaccgtgtccgaatgatagtagattgcaatgccacacctgttcttgtggtccaggacgataggctaactcagtctatgtgcttggttggttctactcttagggctcctcatggttgtcactctcagtatatggctaacatgggatctattgcgtctttagcaatggcggttataatcaatggaaatgaagatgatgggagcaatgtagctagtggaagaagctcgatgaggctttggggtttggttgtttgccatcacacttcttctcgctgcataccgtttccgctaaggtatgcttgtgagtttttgatgcaggctttcggtttacagttaaacatggaattgcagttagctttgcaaatgtcagagaaacgcgttttgagaacgcagacactgttatgtgatatgcttctgcgtgactcgcctgctggaattgttacacagagtcccagtatcatggacttagtgaaatgtgacggtgcagcatttctttaccacgggaagtattacccgttgggtgttgctcctagtgaagttcagataaaagatgttgtggagtggttgcttgcgaatcatgcggattcaaccggattaagcactgatagtttaggcgatgcggggtatcccggtgcagctgcgttaggggatgctgtgtgcggtatggcagttgcatatatcacaaaaagagactttcttttttggtttcgatctcacactgcgaaagaaatcaaatggggaggcgctaagcatcatccggaggataaagatgatgggcaacgaatgcatcctcgttcgtcctttcaggcttttcttgaagttgttaagagccggagtcagccatgggaaactgcggaaatggatgcgattcactcgctccagcttattctgagagactcttttaaagaatctgaggcggctatgaactctaaagttgtggatggtgtggttcagccatgtagggatatggcgggggaacaggggattgatgagttaggtgcagttgcaagagagatggttaggctcattgagactgcaactgttcctatattcgctgtggatgccggaggctgcatcaatggatggaacgctaagattgcagagttgacaggtctctcagttgaagaagctatggggaagtctctggtttctgatttaatatacaaagagaatgaagcaactgtcaataagcttctttctcgtgctttgagaggggacgaggaaaagaatgtggaggttaagctgaaaactttcagccccgaactacaagggaaagcagtttttgtggttgtgaatgcttgttccagcaaggactacttgaacaacattgtcggcgtttgttttgttggacaagacgttactagtcagaaaatcgtaatggataagttcatcaacatacaaggagattacaaggctattgtacatagcccaaaccctctaatcccgccaatttttgctgctgacgagaacacgtgctgcctggaatggaacatggcgatggaaaagcttacgggttggtctcgcagtgaagtgattgggaaaatgattgtcggggaagtgtttgggagctgttgcatgctaaagggtcctgatgctttaaccaagttcatgattgtattgcataatgcgattggtggccaagatacggataagttccctttcccattctttgaccgcaatgggaagtttgttcaggctctattgactgcaaacaagcgggttagcctcgagggaaaggttattggggctttctgtttcttgcaaatcccgagccctgagctgcagcaagctttagcagtccaacggaggcaggacacagagtgtttcacgaaggcaaaagagttggcttatatttgtcaggtgataaagaatcctttgagcggtatgcgtttcgcaaactcattgttggaggccacagacttgaacgaggaccagaagcagttacttgaaacaagtgtttcttgcgagaaacagatctcaaggatcgtcggggacatggatcttgaaagcattgaagacggttcatttgtgctaaagagggaagagtttttccttggaagtgtcataaacgcgattgtaagtcaagcgatgttcttattaagggacagaggtcttcagctgatccgtgacattcccgaagagatcaaatcaatagaggtttttggagaccagataaggattcaacagctcctggctgagtttctgctgagtataatccggtatgcaccatctcaagagtgggtggagatccatttaagccaactttcaaagcaaatggctgatggattcgccgccatccgcacagaattcagaatggcgtgtccaggtgaaggtctgcctccagagctagtccgagacatgttccatagcagcaggtggacaagccctgaaggtttaggtctaagcgtatgtcgaaagattttaaagctaatgaacggtgaggttcaatacatccgagaatcagaacggtcctatttcctcatcattctggaactccctgtacctcgaaagcgaccattgtcaactgctagtggaagtggtgacatgatgctgatgatgccatattagatggtttccggagtcgggggtagtggcggtggccgtggcggtggccgtggcggagaagaagaaccgtcgtcaagtcacactcctaataaccgaagaggaggagaacaagctcaatcgtcgggaacgaaatctctcagaccaagaagcaacactgaatcaatgagcaaagcaattcaacagtacaccgtcgacgcaagactccacgccgttttcgaacaatccggcgaatcagggaaatcattcgactactcacaatcactcaaaacgacgacgtacggttcctctgtacctgagcaacagatcacagcttatctctctcgaatccagcgaggtggttacattcagcctttcggatgtatgatcgccgtcgatgaatccagtttccggatcatcggttacagtgaaaacgccagagaaatgttagggattatgcctcaatctgttcctactcttgagaaacctgagattctagctatgggaactgatgtgagatctttgttcacttcttcgagctcgattctactcgagcgtgctttcgttgctcgagagattaccttgttaaatccggtttggatccattccaagaatactggtaaaccgttttacgccattcttcataggattgatgttggtgttgttattgatttagagccagctagaactgaagatcctgcgctttctattgctggtgctgttcaatcgcagaaactcgcggttcgtgcgatttctcagttacaggctcttcctggtggagatattaagcttttgtgtgacactgtcgtggaaagtgtgagggacttgactggttatgatcgtgttatggtttataagtttcatgaagatgagcatggagaagttgtagctgagagtaaacgagatgatttagagccttatattggactgcatgttcctgctactgatattcctcaagcgtcaaggttcttgtttaagcagaaccgtgtccgaatgatagtagattgcaatgccacacctgttcttgtggtccaggacgataggctaactcagtctatgtgcttggttggttctactcttagggctcctcatggttgtcactctcagtatatggctaacatgggatctattgcgtctttagcaatggcggttataatcaatggaaatgaagatgatgggagcaatgtagctagtggaagaagctcgatgaggctttggggtttggttgtttgccatcacacttcttctcgctgcataccgtttccgctaaggtatgcttgtgagtttttgatgcaggctttcggtttacagttaaacatggaattgcagttagctttgcaaatgtcagagaaacgcgttttgagaacgcagacactgttatgtgatatgcttctgcgtgactcgcctgctggaattgttacacagagtcccagtatcatggacttagtgaaatgtgacggtgcagcatttctttaccacgggaagtattacccgttgggtgttgctcctagtgaagttcagataaaagatgttgtggagtggttgcttgcgaatcatgcggattcaaccggattaagcactgatagtttaggcgatgcggggtatcccggtgcagctgcgttaggggatgctgtgtgcggtatggcagttgcatatatcacaaaaagagactttcttttttggtttcgatctcacactgcgaaagaaatcaaatggggaggcgctaagcatcatccggaggataaagatgatgggcaacgaatgcatcctcgttcgtcctttcaggcttttcttgaagttgttaagagccggagtcagccatgggaaactgcggaaatggatgcgattcactcgctccagcttattctgagagactcttttaaagaatctgaggcggctatgaactctaaagttgtggatggtgtggttcagccatgtagggatatggcgggggaacaggggattgatgagttaggtgcagttgcaagagagatggttaggctcattgagactgcaactgttcctatattcgctgtggatgccggaggctgcatcaatggatggaacgctaagattgcagagttgacaggtctctcagttgaagaagctatggggaagtctctggtttctgatttaatatacaaagagaatgaagcaactgtcaataagcttctttctcgtgctttgagaggggacgaggaaaagaatgtggaggttaagctgaaaactttcagccccgaactacaagggaaagcagtttttgtggttgtgaatgcttgttccagcaaggactacttgaacaacattgtcggcgtttgttttgttggacaagacgttactagtcagaaaatcgtaatggataagttcatcaacatacaaggagattacaaggctattgtacatagcccaaaccctctaatcccgccaatttttgctgctgacgagaacacgtgctgcctggaatggaacatggcgatggaaaagcttacgggttggtctcgcagtgaagtgattgggaaaatgattgtcggggaagtgtttgggagctgttgcatgctaaagggtcctgatgctttaaccaagttcatgattgtattgcataatgcgattggtggccaagatacggataagttccctttcccattctttgaccgcaatgggaagtttgttcaggctctattgactgcaaacaagcgggttagcctcgagggaaaggttattggggctttctgtttcttgcaaatcccgagccctgagctgcagcaagctttagcagtccaacggaggcaggacacagagtgtttcacgaaggcaaaagagttggcttatatttgtcaggtgataaagaatcctttgagcggtatgcgtttcgcaaactcattgttggaggccacagacttgaacgaggaccagaagcagttacttgaaacaagtgtttcttgcgagaaacagatctcaaggatcgtcggggacatggatcttgaaagcattgaagacggttcatttgtgctaaagagggaagagtttttccttggaagtgtcataaacgcgattgtaagtcaagcgatgttcttattaagggacagaggtcttcagctgatccgtgacattcccgaagagatcaaatcaatagaggtttttggagaccagataaggattcaacagctcctggctgagtttctgctgagtataatccggtatgcaccatctcaagagtgggtggagatccatttaagccaactttcaaagcaaatggctgatggattcgccgccatccgcacagaattcagaatggcgtgtccaggtgaaggtctgcctccagagctagtccgagacatgttccatagcagcaggtggacaagccctgaaggtttaggtctaagcgtatgtcgaaagattttaaagctaatgaacggtgaggttcaatacatccgagaatcagaacggtcctatttcctcatcattctggaactccctgtacctcgaaagcgaccattgtcaactgctagtggaagtggtgacatgatgctgatgatgccatattagatggtttccggagtcgggggtagtggcggtggccgtggcggtggccgtggcggagaagaagaaccgtcgtcaagtcacactcctaataaccgaagaggaggagaacaagctcaatcgtcgggaacgaaatctctcagaccaagaagcaacactgaatcaatgagcaaagcaattcaacagtacaccgtcgacgcaagactccacgccgttttcgaacaatccggcgaatcagggaaatcattcgactactcacaatcactcaaaacgacgacgtacggttcctctgtacctgagcaacagatcacagcttatctctctcgaatccagcgaggtggttacattcagcctttcggatgtatgatcgccgtcgatgaatccagtttccggatcatcggttacagtgaaaacgccagagaaatgttagggattatgcctcaatctgttcctactcttgagaaacctgagattctagctatgggaactgatgtgagatctttgttcacttcttcgagctcgattctactcgagcgtgctttcgttgctcgagagattaccttgttaaatccggtttggatccattccaagaatactggtaaaccgttttacgccattcttcataggattgatgttggtgttgttattgatttagagccagctagaactgaagatcctgcgctttctattgctggtgctgttcaatcgcagaaactcgcggttcgtgcgatttctcagttacaggctcttcctggtggagatattaagcttttgtgtgacactgtcgtggaaagtgtgagggacttgactggttatgatcgtgttatggtttataagtttcatgaagatgagcatggagaagttgtagctgagagtaaacgagatgatttagagccttatattggactgcatgttcctgctactgatattcctcaagcgtcaaggttcttgtttaagcagaaccgtgtccgaatgatagtagattgcaatgccacacctgttcttgtggtccaggacgataggctaactcagtctatgtgcttggttggttctactcttagggctcctcatggttgtcactctcagtatatggctaacatgggatctattgcgtctttagcaatggcggttataatcaatggaaatgaagatgatgggagcaatgtagctagtggaagaagctcgatgaggctttggggtttggttgtttgccatcacacttcttctcgctgcataccgtttccgctaaggtatgcttgtgagtttttgatgcaggctttcggtttacagttaaacatggaattgcagttagctttgcaaatgtcagagaaacgcgttttgagaacgcagacactgttatgtgatatgcttctgcgtgactcgcctgctggaattgttacacagagtcccagtatcatggacttagtgaaatgtgacggtgcagcatttctttaccacgggaagtattacccgttgggtgttgctcctagtgaagttcagataaaagatgttgtggagtggttgcttgcgaatcatgcggattcaaccggattaagcactgatagtttaggcgatgcggggtatcccggtgcagctgcgttaggggatgctgtgtgcggtatggcagttgcatatatcacaaaaagagactttcttttttggtttcgatctcacactgcgaaagaaatcaaatggggaggcgctaagcatcatccggaggataaagatgatgggcaacgaatgcatcctcgttcgtcctttcaggcttttcttgaagttgttaagagccggagtcagccatgggaaactgcggaaatggatgcgattcactcgctccagcttattctgagagactcttttaaagaatctgaggcggctatgaactctaaagttgtggatggtgtggttcagccatgtagggatatggcgggggaacaggggattgatgagttaggtgcagttgcaagagagatggttaggctcattgagactgcaactgttcctatattcgctgtggatgccggaggctgcatcaatggatggaacgctaagattgcagagttgacaggtctctcagttgaagaagctatggggaagtctctggtttctgatttaatatacaaagagaatgaagcaactgtcaataagcttctttctcgtgctttgagaggggacgaggaaaagaatgtggaggttaagctgaaaactttcagccccgaactacaagggaaagcagtttttgtggttgtgaatgcttgttccagcaaggactacttgaacaacattgtcggcgtttgttttgttggacaagacgttactagtcagaaaatcgtaatggataagttcatcaacatacaaggagattacaaggctattgtacatagcccaaaccctctaatcccgccaatttttgctgctgacgagaacacgtgctgcctggaatggaacatggcgatggaaaagcttacgggttggtctcgcagtgaagtgattgggaaaatgattgtcggggaagtgtttgggagctgttgcatgctaaagggtcctgatgctttaaccaagttcatgattgtattgcataatgcgattggtggccaagatacggataagttccctttcccattctttgaccgcaatgggaagtttgttcaggctctattgactgcaaacaagcgggttagcctcgagggaaaggttattggggctttctgtttcttgcaaatcccgagccctgagctgcagcaagctttagcagtccaacggaggcaggacacagagtgtttcacgaaggcaaaagagttggcttatatttgtcaggtgataaagaatcctttgagcggtatgcgtttcgcaaactcattgttggaggccacagacttgaacgaggaccagaagcagttacttgaaacaagtgtttcttgcgagaaacagatctcaaggatcgtcggggacatggatcttgaaagcattgaagacggttcatttgtgctaaagagggaagagtttttccttggaagtgtcataaacgcgattgtaagtcaagcgatgttcttattaagggacagaggtcttcagctgatccgtgacattcccgaagagatcaaatcaatagaggtttttggagaccagataaggattcaacagctcctggctgagtttctgctgagtataatccggtatgcaccatctcaagagtgggtggagatccatttaagccaactttcaaagcaaatggctgatggattcgccgccatccgcacagaattcagaatggcgtgtccaggtgaaggtctgcctccagagctagtccgagacatgttccatagcagcaggtggacaagccctgaaggtttaggtctaagcgtatgtcgaaagattttaaagctaatgaacggtgaggttcaatacatccgagaatcagaacggtcctatttcctcatcattctggaactccctgtacctcgaaagcgaccattgtcaactgctagtggaagtggtgacatgatgctgatgatgccatattagatggtttccggagtcgggggtagtggcggtggccgtggcggtggccgtggcggagaagaagaaccgtcgtcaagtcacactcctaataaccgaagaggaggagaacaagctcaatcgtcgggaacgaaatctctcagaccaagaagcaacactgaatcaatgagcaaagcaattcaacagtacaccgtcgacgcaagactccacgccgttttcgaacaatccggcgaatcagggaaatcattcgactactcacaatcactcaaaacgacgacgtacggttcctctgtacctgagcaacagatcacagcttatctctctcgaatccagcgaggtggttacattcagcctttcggatgtatgatcgccgtcgatgaatccagtttccggatcatcggttacagtgaaaacgccagagaaatgttagggattatgcctcaatctgttcctactcttgagaaacctgagattctagctatgggaactgatgtgagatctttgttcacttcttcgagctcgattctactcgagcgtgctttcgttgctcgagagattaccttgttaaatccggtttggatccattccaagaatactggtaaaccgttttacgccattcttcataggattgatgttggtgttgttattgatttagagccagctagaactgaagatcctgcgctttctattgctggtgctgttcaatcgcagaaactcgcggttcgtgcgatttctcagttacaggctcttcctggtggagatattaagcttttgtgtgacactgtcgtggaaagtgtgagggacttgactggttatgatcgtgttatggtttataagtttcatgaagatgagcatggagaagttgtagctgagagtaaacgagatgatttagagccttatattggactgcatgttcctgctactgatattcctcaagcgtcaaggttcttgtttaagcagaaccgtgtccgaatgatagtagattgcaatgccacacctgttcttgtggtccaggacgataggctaactcagtctatgtgcttggttggttctactcttagggctcctcatggttgtcactctcagtatatggctaacatgggatctattgcgtctttagcaatggcggttataatcaatggaaatgaagatgatgggagcaatgtagctagtggaagaagctcgatgaggctttggggtttggttgtttgccatcacacttcttctcgctgcataccgtttccgctaaggtatgcttgtgagtttttgatgcaggctttcggtttacagttaaacatggaattgcagttagctttgcaaatgtcagagaaacgcgttttgagaacgcagacactgttatgtgatatgcttctgcgtgactcgcctgctggaattgttacacagagtcccagtatcatggacttagtgaaatgtgacggtgcagcatttctttaccacgggaagtattacccgttgggtgttgctcctagtgaagttcagataaaagatgttgtggagtggttgcttgcgaatcatgcggattcaaccggattaagcactgatagtttaggcgatgcggggtatcccggtgcagctgcgttaggggatgctgtgtgcggtatggcagttgcatatatcacaaaaagagactttcttttttggtttcgatctcacactgcgaaagaaatcaaatggggaggcgctaagcatcatccggaggataaagatgatgggcaacgaatgcatcctcgttcgtcctttcaggcttttcttgaagttgttaagagccggagtcagccatgggaaactgcggaaatggatgcgattcactcgctccagcttattctgagagactcttttaaagaatctgaggcggctatgaactctaaagttgtggatggtgtggttcagccatgtagggatatggcgggggaacaggggattgatgagttaggtgcagttgcaagagagatggttaggctcattgagactgcaactgttcctatattcgctgtggatgccggaggctgcatcaatggatggaacgctaagattgcagagttgacaggtctctcagttgaagaagctatggggaagtctctggtttctgatttaatatacaaagagaatgaagcaactgtcaataagcttctttctcgtgctttgagaggggacgaggaaaagaatgtggaggttaagctgaaaactttcagccccgaactacaagggaaagcagtttttgtggttgtgaatgcttgttccagcaaggactacttgaacaacattgtcggcgtttgttttgttggacaagacgttactagtcagaaaatcgtaatggataagttcatcaacatacaaggagattacaaggctattgtacatagcccaaaccctctaatcccgccaatttttgctgctgacgagaacacgtgctgcctggaatggaacatggcgatggaaaagcttacgggttggtctcgcagtgaagtgattgggaaaatgattgtcggggaagtgtttgggagctgttgcatgctaaagggtcctgatgctttaaccaagttcatgattgtattgcataatgcgattggtggccaagatacggataagttccctttcccattctttgaccgcaatgggaagtttgttcaggctctattgactgcaaacaagcgggttagcctcgagggaaaggttattggggctttctgtttcttgcaaatcccgagccctgagctgcagcaagctttagcagtccaacggaggcaggacacagagtgtttcacgaaggcaaaagagttggcttatatttgtcaggtgataaagaatcctttgagcggtatgcgtttcgcaaactcattgttggaggccacagacttgaacgaggaccagaagcagttacttgaaacaagtgtttcttgcgagaaacagatctcaaggatcgtcggggacatggatcttgaaagcattgaagacggttcatttgtgctaaagagggaagagtttttccttggaagtgtcataaacgcgattgtaagtcaagcgatgttcttattaagggacagaggtcttcagctgatccgtgacattcccgaagagatcaaatcaatagaggtttttggagaccagataaggattcaacagctcctggctgagtttctgctgagtataatccggtatgcaccatctcaagagtgggtggagatccatttaagccaactttcaaagcaaatggctgatggattcgccgccatccgcacagaattcagaatggcgtgtccaggtgaaggtctgcctccagagctagtccgagacatgttccatagcagcaggtggacaagccctgaaggtttaggtctaagcgtatgtcgaaagattttaaagctaatgaacggtgaggttcaatacatccgagaatcagaacggtcctatttcctcatcattctggaactccctgtacctcgaaagcgaccattgtcaactgctagtggaagtggtgacatgatgctgatgatgccatattagatggtttccggagtcgggggtagtggcggtggccgtggcggtggccgtggcggagaagaagaaccgtcgtcaagtcacactcctaataaccgaagaggaggagaacaagctcaatcgtcgggaacgaaatctctcagaccaagaagcaacactgaatcaatgagcaaagcaattcaacagtacaccgtcgacgcaagactccacgccgttttcgaacaatccggcgaatcagggaaatcattcgactactcacaatcactcaaaacgacgacgtacggttcctctgtacctgagcaacagatcacagcttatctctctcgaatccagcgaggtggttacattcagcctttcggatgtatgatcgccgtcgatgaatccagtttccggatcatcggttacagtgaaaacgccagagaaatgttagggattatgcctcaatctgttcctactcttgagaaacctgagattctagctatgggaactgatgtgagatctttgttcacttcttcgagctcgattctactcgagcgtgctttcgttgctcgagagattaccttgttaaatccggtttggatccattccaagaatactggtaaaccgttttacgccattcttcataggattgatgttggtgttgttattgatttagagccagctagaactgaagatcctgcgctttctattgctggtgctgttcaatcgcagaaactcgcggttcgtgcgatttctcagttacaggctcttcctggtggagatattaagcttttgtgtgacactgtcgtggaaagtgtgagggacttgactggttatgatcgtgttatggtttataagtttcatgaagatgagcatggagaagttgtagctgagagtaaacgagatgatttagagccttatattggactgcatgttcctgctactgatattcctcaagcgtcaaggttcttgtttaagcagaaccgtgtccgaatgatagtagattgcaatgccacacctgttcttgtggtccaggacgataggctaactcagtctatgtgcttggttggttctactcttagggctcctcatggttgtcactctcagtatatggctaacatgggatctattgcgtctttagcaatggcggttataatcaatggaaatgaagatgatgggagcaatgtagctagtggaagaagctcgatgaggctttggggtttggttgtttgccatcacacttcttctcgctgcataccgtttccgctaaggtatgcttgtgagtttttgatgcaggctttcggtttacagttaaacatggaattgcagttagctttgcaaatgtcagagaaacgcgttttgagaacgcagacactgttatgtgatatgcttctgcgtgactcgcctgctggaattgttacacagagtcccagtatcatggacttagtgaaatgtgacggtgcagcatttctttaccacgggaagtattacccgttgggtgttgctcctagtgaagttcagataaaagatgttgtggagtggttgcttgcgaatcatgcggattcaaccggattaagcactgatagtttaggcgatgcggggtatcccggtgcagctgcgttaggggatgctgtgtgcggtatggcagttgcatatatcacaaaaagagactttcttttttggtttcgatctcacactgcgaaagaaatcaaatggggaggcgctaagcatcatccggaggataaagatgatgggcaacgaatgcatcctcgttcgtcctttcaggcttttcttgaagttgttaagagccggagtcagccatgggaaactgcggaaatggatgcgattcactcgctccagcttattctgagagactcttttaaagaatctgaggcggctatgaactctaaagttgtggatggtgtggttcagccatgtagggatatggcgggggaacaggggattgatgagttaggtgcagttgcaagagagatggttaggctcattgagactgcaactgttcctatattcgctgtggatgccggaggctgcatcaatggatggaacgctaagattgcagagttgacaggtctctcagttgaagaagctatggggaagtctctggtttctgatttaatatacaaagagaatgaagcaactgtcaataagcttctttctcgtgctttgagaggggacgaggaaaagaatgtggaggttaagctgaaaactttcagccccgaactacaagggaaagcagtttttgtggttgtgaatgcttgttccagcaaggactacttgaacaacattgtcggcgtttgttttgttggacaagacgttactagtcagaaaatcgtaatggataagttcatcaacatacaaggagattacaaggctattgtacatagcccaaaccctctaatcccgccaatttttgctgctgacgagaacacgtgctgcctggaatggaacatggcgatggaaaagcttacgggttggtctcgcagtgaagtgattgggaaaatgattgtcggggaagtgtttgggagctgttgcatgctaaagggtcctgatgctttaaccaagttcatgattgtattgcataatgcgattggtggccaagatacggataagttccctttcccattctttgaccgcaatgggaagtttgttcaggctctattgactgcaaacaagcgggttagcctcgagggaaaggttattggggctttctgtttcttgcaaatcccgagccctgagctgcagcaagctttagcagtccaacggaggcaggacacagagtgtttcacgaaggcaaaagagttggcttatatttgtcaggtgataaagaatcctttgagcggtatgcgtttcgcaaactcattgttggaggccacagacttgaacgaggaccagaagcagttacttgaaacaagtgtttcttgcgagaaacagatctcaaggatcgtcggggacatggatcttgaaagcattgaagacggttcatttgtgctaaagagggaagagtttttccttggaagtgtcataaacgcgattgtaagtcaagcgatgttcttattaagggacagaggtcttcagctgatccgtgacattcccgaagagatcaaatcaatagaggtttttggagaccagataaggattcaacagctcctggctgagtttctgctgagtataatccggtatgcaccatctcaagagtgggtggagatccatttaagccaactttcaaagcaaatggctgatggattcgccgccatccgcacagaattcagaatggcgtgtccaggtgaaggtctgcctccagagctagtccgagacatgttccatagcagcaggtggacaagccctgaaggtttaggtctaagcgtatgtcgaaagattttaaagctaatgaacggtgaggttcaatacatccgagaatcagaacggtcctatttcctcatcattctggaactccctgtacctcgaaagcgaccattgtcaactgctagtggaagtggtgacatgatgctgatgatgccatattagatggtttccggagtcgggggtagtggcggtggccgtggcggtggccgtggcggagaagaagaaccgtcgtcaagtcacactcctaataaccgaagaggaggagaacaagctcaatcgtcgggaacgaaatctctcagaccaagaagcaacactgaatcaatgagcaaagcaattcaacagtacaccgtcgacgcaagactccacgccgttttcgaacaatccggcgaatcagggaaatcattcgactactcacaatcactcaaaacgacgacgtacggttcctctgtacctgagcaacagatcacagcttatctctctcgaatccagcgaggtggttacattcagcctttcggatgtatgatcgccgtcgatgaatccagtttccggatcatcggttacagtgaaaacgccagagaaatgttagggattatgcctcaatctgttcctactcttgagaaacctgagattctagctatgggaactgatgtgagatctttgttcacttcttcgagctcgattctactcgagcgtgctttcgttgctcgagagattaccttgttaaatccggtttggatccattccaagaatactggtaaaccgttttacgccattcttcataggattgatgttggtgttgttattgatttagagccagctagaactgaagatcctgcgctttctattgctggtgctgttcaatcgcagaaactcgcggttcgtgcgatttctcagttacaggctcttcctggtggagatattaagcttttgtgtgacactgtcgtggaaagtgtgagggacttgactggttatgatcgtgttatggtttataagtttcatgaagatgagcatggagaagttgtagctgagagtaaacgagatgatttagagccttatattggactgcatgttcctgctactgatattcctcaagcgtcaaggttcttgtttaagcagaaccgtgtccgaatgatagtagattgcaatgccacacctgttcttgtggtccaggacgataggctaactcagtctatgtgcttggttggttctactcttagggctcctcatggttgtcactctcagtatatggctaacatgggatctattgcgtctttagcaatggcggttataatcaatggaaatgaagatgatgggagcaatgtagctagtggaagaagctcgatgaggctttggggtttggttgtttgccatcacacttcttctcgctgcataccgtttccgctaaggtatgcttgtgagtttttgatgcaggctttcggtttacagttaaacatggaattgcagttagctttgcaaatgtcagagaaacgcgttttgagaacgcagacactgttatgtgatatgcttctgcgtgactcgcctgctggaattgttacacagagtcccagtatcatggacttagtgaaatgtgacggtgcagcatttctttaccacgggaagtattacccgttgggtgttgctcctagtgaagttcagataaaagatgttgtggagtggttgcttgcgaatcatgcggattcaaccggattaagcactgatagtttaggcgatgcggggtatcccggtgcagctgcgttaggggatgctgtgtgcggtatggcagttgcatatatcacaaaaagagactttcttttttggtttcgatctcacactgcgaaagaaatcaaatggggaggcgctaagcatcatccggaggataaagatgatgggcaacgaatgcatcctcgttcgtcctttcaggcttttcttgaagttgttaagagccggagtcagccatgggaaactgcggaaatggatgcgattcactcgctccagcttattctgagagactcttttaaagaatctgaggcggctatgaactctaaagttgtggatggtgtggttcagccatgtagggatatggcgggggaacaggggattgatgagttaggtgcagttgcaagagagatggttaggctcattgagactgcaactgttcctatattcgctgtggatgccggaggctgcatcaatggatggaacgctaagattgcagagttgacaggtctctcagttgaagaagctatggggaagtctctggtttctgatttaatatacaaagagaatgaagcaactgtcaataagcttctttctcgtgctttgagaggggacgaggaaaagaatgtggaggttaagctgaaaactttcagccccgaactacaagggaaagcagtttttgtggttgtgaatgcttgttccagcaaggactacttgaacaacattgtcggcgtttgttttgttggacaagacgttactagtcagaaaatcgtaatggataagttcatcaacatacaaggagattacaaggctattgtacatagcccaaaccctctaatcccgccaatttttgctgctgacgagaacacgtgctgcctggaatggaacatggcgatggaaaagcttacgggttggtctcgcagtgaagtgattgggaaaatgattgtcggggaagtgtttgggagctgttgcatgctaaagggtcctgatgctttaaccaagttcatgattgtattgcataatgcgattggtggccaagatacggataagttccctttcccattctttgaccgcaatgggaagtttgttcaggctctattgactgcaaacaagcgggttagcctcgagggaaaggttattggggctttctgtttcttgcaaatcccgagccctgagctgcagcaagctttagcagtccaacggaggcaggacacagagtgtttcacgaaggcaaaagagttggcttatatttgtcaggtgataaagaatcctttgagcggtatgcgtttcgcaaactcattgttggaggccacagacttgaacgaggaccagaagcagttacttgaaacaagtgtttcttgcgagaaacagatctcaaggatcgtcggggacatggatcttgaaagcattgaagacggttcatttgtgctaaagagggaagagtttttccttggaagtgtcataaacgcgattgtaagtcaagcgatgttcttattaagggacagaggtcttcagctgatccgtgacattcccgaagagatcaaatcaatagaggtttttggagaccagataaggattcaacagctcctggctgagtttctgctgagtataatccggtatgcaccatctcaagagtgggtggagatccatttaagccaactttcaaagcaaatggctgatggattcgccgccatccgcacagaattcagaatggcgtgtccaggtgaaggtctgcctccagagctagtccgagacatgttccatagcagcaggtggacaagccctgaaggtttaggtctaagcgtatgtcgaaagattttaaagctaatgaacggtgaggttcaatacatccgagaatcagaacggtcctatttcctcatcattctggaactccctgtacctcgaaagcgaccattgtcaactgctagtggaagtggtgacatgatgctgatgatgccatattagatggtttccggagtcgggggtagtggcggtggccgtggcggtggccgtggcggagaagaagaaccgtcgtcaagtcacactcctaataaccgaagaggaggagaacaagctcaatcgtcgggaacgaaatctctcagaccaagaagcaacactgaatcaatgagcaaagcaattcaacagtacaccgtcgacgcaagactccacgccgttttcgaacaatccggcgaatcagggaaatcattcgactactcacaatcactcaaaacgacgacgtacggttcctctgtacctgagcaacagatcacagcttatctctctcgaatccagcgaggtggttacattcagcctttcggatgtatgatcgccgtcgatgaatccagtttccggatcatcggttacagtgaaaacgccagagaaatgttagggattatgcctcaatctgttcctactcttgagaaacctgagattctagctatgggaactgatgtgagatctttgttcacttcttcgagctcgattctactcgagcgtgctttcgttgctcgagagattaccttgttaaatccggtttggatccattccaagaatactggtaaaccgttttacgccattcttcataggattgatgttggtgttgttattgatttagagccagctagaactgaagatcctgcgctttctattgctggtgctgttcaatcgcagaaactcgcggttcgtgcgatttctcagttacaggctcttcctggtggagatattaagcttttgtgtgacactgtcgtggaaagtgtgagggacttgactggttatgatcgtgttatggtttataagtttcatgaagatgagcatggagaagttgtagctgagagtaaacgagatgatttagagccttatattggactgcatgttcctgctactgatattcctcaagcgtcaaggttcttgtttaagcagaaccgtgtccgaatgatagtagattgcaatgccacacctgttcttgtggtccaggacgataggctaactcagtctatgtgcttggttggttctactcttagggctcctcatggttgtcactctcagtatatggctaacatgggatctattgcgtctttagcaatggcggttataatcaatggaaatgaagatgatgggagcaatgtagctagtggaagaagctcgatgaggctttggggtttggttgtttgccatcacacttcttctcgctgcataccgtttccgctaaggtatgcttgtgagtttttgatgcaggctttcggtttacagttaaacatggaattgcagttagctttgcaaatgtcagagaaacgcgttttgagaacgcagacactgttatgtgatatgcttctgcgtgactcgcctgctggaattgttacacagagtcccagtatcatggacttagtgaaatgtgacggtgcagcatttctttaccacgggaagtattacccgttgggtgttgctcctagtgaagttcagataaaagatgttgtggagtggttgcttgcgaatcatgcggattcaaccggattaagcactgatagtttaggcgatgcggggtatcccggtgcagctgcgttaggggatgctgtgtgcggtatggcagttgcatatatcacaaaaagagactttcttttttggtttcgatctcacactgcgaaagaaatcaaatggggaggcgctaagcatcatccggaggataaagatgatgggcaacgaatgcatcctcgttcgtcctttcaggcttttcttgaagttgttaagagccggagtcagccatgggaaactgcggaaatggatgcgattcactcgctccagcttattctgagagactcttttaaagaatctgaggcggctatgaactctaaagttgtggatggtgtggttcagccatgtagggatatggcgggggaacaggggattgatgagttaggtgcagttgcaagagagatggttaggctcattgagactgcaactgttcctatattcgctgtggatgccggaggctgcatcaatggatggaacgctaagattgcagagttgacaggtctctcagttgaagaagctatggggaagtctctggtttctgatttaatatacaaagagaatgaagcaactgtcaataagcttctttctcgtgctttgagaggggacgaggaaaagaatgtggaggttaagctgaaaactttcagccccgaactacaagggaaagcagtttttgtggttgtgaatgcttgttccagcaaggactacttgaacaacattgtcggcgtttgttttgttggacaagacgttactagtcagaaaatcgtaatggataagttcatcaacatacaaggagattacaaggctattgtacatagcccaaaccctctaatcccgccaatttttgctgctgacgagaacacgtgctgcctggaatggaacatggcgatggaaaagcttacgggttggtctcgcagtgaagtgattgggaaaatgattgtcggggaagtgtttgggagctgttgcatgctaaagggtcctgatgctttaaccaagttcatgattgtattgcataatgcgattggtggccaagatacggataagttccctttcccattctttgaccgcaatgggaagtttgttcaggctctattgactgcaaacaagcgggttagcctcgagggaaaggttattggggctttctgtttcttgcaaatcccgagccctgagctgcagcaagctttagcagtccaacggaggcaggacacagagtgtttcacgaaggcaaaagagttggcttatatttgtcaggtgataaagaatcctttgagcggtatgcgtttcgcaaactcattgttggaggccacagacttgaacgaggaccagaagcagttacttgaaacaagtgtttcttgcgagaaacagatctcaaggatcgtcggggacatggatcttgaaagcattgaagacggttcatttgtgctaaagagggaagagtttttccttggaagtgtcataaacgcgattgtaagtcaagcgatgttcttattaagggacagaggtcttcagctgatccgtgacattcccgaagagatcaaatcaatagaggtttttggagaccagataaggattcaacagctcctggctgagtttctgctgagtataatccggtatgcaccatctcaagagtgggtggagatccatttaagccaactttcaaagcaaatggctgatggattcgccgccatccgcacagaattcagaatggcgtgtccaggtgaaggtctgcctccagagctagtccgagacatgttccatagcagcaggtggacaagccctgaaggtttaggtctaagcgtatgtcgaaagattttaaagctaatgaacggtgaggttcaatacatccgagaatcagaacggtcctatttcctcatcattctggaactccctgtacctcgaaagcgaccattgtcaactgctagtggaagtggtgacatgatgctgatgatgccatattagatggtttccggagtcgggggtagtggcggtggccgtggcggtggccgtggcggagaagaagaaccgtcgtcaagtcacactcctaataaccgaagaggaggagaacaagctcaatcgtcgggaacgaaatctctcagaccaagaagcaacactgaatcaatgagcaaagcaattcaacagtacaccgtcgacgcaagactccacgccgttttcgaacaatccggcgaatcagggaaatcattcgactactcacaatcactcaaaacgacgacgtacggttcctctgtacctgagcaacagatcacagcttatctctctcgaatccagcgaggtggttacattcagcctttcggatgtatgatcgccgtcgatgaatccagtttccggatcatcggttacagtgaaaacgccagagaaatgttagggattatgcctcaatctgttcctactcttgagaaacctgagattctagctatgggaactgatgtgagatctttgttcacttcttcgagctcgattctactcgagcgtgctttcgttgctcgagagattaccttgttaaatccggtttggatccattccaagaatactggtaaaccgttttacgccattcttcataggattgatgttggtgttgttattgatttagagccagctagaactgaagatcctgcgctttctattgctggtgctgttcaatcgcagaaactcgcggttcgtgcgatttctcagttacaggctcttcctggtggagatattaagcttttgtgtgacactgtcgtggaaagtgtgagggacttgactggttatgatcgtgttatggtttataagtttcatgaagatgagcatggagaagttgtagctgagagtaaacgagatgatttagagccttatattggactgcatgttcctgctactgatattcctcaagcgtcaaggttcttgtttaagcagaaccgtgtccgaatgatagtagattgcaatgccacacctgttcttgtggtccaggacgataggctaactcagtctatgtgcttggttggttctactcttagggctcctcatggttgtcactctcagtatatggctaacatgggatctattgcgtctttagcaatggcggttataatcaatggaaatgaagatgatgggagcaatgtagctagtggaagaagctcgatgaggctttggggtttggttgtttgccatcacacttcttctcgctgcataccgtttccgctaaggtatgcttgtgagtttttgatgcaggctttcggtttacagttaaacatggaattgcagttagctttgcaaatgtcagagaaacgcgttttgagaacgcagacactgttatgtgatatgcttctgcgtgactcgcctgctggaattgttacacagagtcccagtatcatggacttagtgaaatgtgacggtgcagcatttctttaccacgggaagtattacccgttgggtgttgctcctagtgaagttcagataaaagatgttgtggagtggttgcttgcgaatcatgcggattcaaccggattaagcactgatagtttaggcgatgcggggtatcccggtgcagctgcgttaggggatgctgtgtgcggtatggcagttgcatatatcacaaaaagagactttcttttttggtttcgatctcacactgcgaaagaaatcaaatggggaggcgctaagcatcatccggaggataaagatgatgggcaacgaatgcatcctcgttcgtcctttcaggcttttcttgaagttgttaagagccggagtcagccatgggaaactgcggaaatggatgcgattcactcgctccagcttattctgagagactcttttaaagaatctgaggcggctatgaactctaaagttgtggatggtgtggttcagccatgtagggatatggcgggggaacaggggattgatgagttaggtgcagttgcaagagagatggttaggctcattgagactgcaactgttcctatattcgctgtggatgccggaggctgcatcaatggatggaacgctaagattgcagagttgacaggtctctcagttgaagaagctatggggaagtctctggtttctgatttaatatacaaagagaatgaagcaactgtcaataagcttctttctcgtgctttgagaggggacgaggaaaagaatgtggaggttaagctgaaaactttcagccccgaactacaagggaaagcagtttttgtggttgtgaatgcttgttccagcaaggactacttgaacaacattgtcggcgtttgttttgttggacaagacgttactagtcagaaaatcgtaatggataagttcatcaacatacaaggagattacaaggctattgtacatagcccaaaccctctaatcccgccaatttttgctgctgacgagaacacgtgctgcctggaatggaacatggcgatggaaaagcttacgggttggtctcgcagtgaagtgattgggaaaatgattgtcggggaagtgtttgggagctgttgcatgctaaagggtcctgatgctttaaccaagttcatgattgtattgcataatgcgattggtggccaagatacggataagttccctttcccattctttgaccgcaatgggaagtttgttcaggctctattgactgcaaacaagcgggttagcctcgagggaaaggttattggggctttctgtttcttgcaaatcccgagccctgagctgcagcaagctttagcagtccaacggaggcaggacacagagtgtttcacgaaggcaaaagagttggcttatatttgtcaggtgataaagaatcctttgagcggtatgcgtttcgcaaactcattgttggaggccacagacttgaacgaggaccagaagcagttacttgaaacaagtgtttcttgcgagaaacagatctcaaggatcgtcggggacatggatcttgaaagcattgaagacggttcatttgtgctaaagagggaagagtttttccttggaagtgtcataaacgcgattgtaagtcaagcgatgttcttattaagggacagaggtcttcagctgatccgtgacattcccgaagagatcaaatcaatagaggtttttggagaccagataaggattcaacagctcctggctgagtttctgctgagtataatccggtatgcaccatctcaagagtgggtggagatccatttaagccaactttcaaagcaaatggctgatggattcgccgccatccgcacagaattcagaatggcgtgtccaggtgaaggtctgcctccagagctagtccgagacatgttccatagcagcaggtggacaagccctgaaggtttaggtctaagcgtatgtcgaaagattttaaagctaatgaacggtgaggttcaatacatccgagaatcagaacggtcctatttcctcatcattctggaactccctgtacctcgaaagcgaccattgtcaactgctagtggaagtggtgacatgatgctgatgatgccatattagatggtttccggagtcgggggtagtggcggtggccgtggcggtggccgtggcggagaagaagaaccgtcgtcaagtcacactcctaataaccgaagaggaggagaacaagctcaatcgtcgggaacgaaatctctcagaccaagaagcaacactgaatcaatgagcaaagcaattcaacagtacaccgtcgacgcaagactccacgccgttttcgaacaatccggcgaatcagggaaatcattcgactactcacaatcactcaaaacgacgacgtacggttcctctgtacctgagcaacagatcacagcttatctctctcgaatccagcgaggtggttacattcagcctttcggatgtatgatcgccgtcgatgaatccagtttccggatcatcggttacagtgaaaacgccagagaaatgttagggattatgcctcaatctgttcctactcttgagaaacctgagattctagctatgggaactgatgtgagatctttgttcacttcttcgagctcgattctactcgagcgtgctttcgttgctcgagagattaccttgttaaatccggtttggatccattccaagaatactggtaaaccgttttacgccattcttcataggattgatgttggtgttgttattgatttagagccagctagaactgaagatcctgcgctttctattgctggtgctgttcaatcgcagaaactcgcggttcgtgcgatttctcagttacaggctcttcctggtggagatattaagcttttgtgtgacactgtcgtggaaagtgtgagggacttgactggttatgatcgtgttatggtttataagtttcatgaagatgagcatggagaagttgtagctgagagtaaacgagatgatttagagccttatattggactgcatgttcctgctactgatattcctcaagcgtcaaggttcttgtttaagcagaaccgtgtccgaatgatagtagattgcaatgccacacctgttcttgtggtccaggacgataggctaactcagtctatgtgcttggttggttctactcttagggctcctcatggttgtcactctcagtatatggctaacatgggatctattgcgtctttagcaatggcggttataatcaatggaaatgaagatgatgggagcaatgtagctagtggaagaagctcgatgaggctttggggtttggttgtttgccatcacacttcttctcgctgcataccgtttccgctaaggtatgcttgtgagtttttgatgcaggctttcggtttacagttaaacatggaattgcagttagctttgcaaatgtcagagaaacgcgttttgagaacgcagacactgttatgtgatatgcttctgcgtgactcgcctgctggaattgttacacagagtcccagtatcatggacttagtgaaatgtgacggtgcagcatttctttaccacgggaagtattacccgttgggtgttgctcctagtgaagttcagataaaagatgttgtggagtggttgcttgcgaatcatgcggattcaaccggattaagcactgatagtttaggcgatgcggggtatcccggtgcagctgcgttaggggatgctgtgtgcggtatggcagttgcatatatcacaaaaagagactttcttttttggtttcgatctcacactgcgaaagaaatcaaatggggaggcgctaagcatcatccggaggataaagatgatgggcaacgaatgcatcctcgttcgtcctttcaggcttttcttgaagttgttaagagccggagtcagccatgggaaactgcggaaatggatgcgattcactcgctccagcttattctgagagactcttttaaagaatctgaggcggctatgaactctaaagttgtggatggtgtggttcagccatgtagggatatggcgggggaacaggggattgatgagttaggtgcagttgcaagagagatggttaggctcattgagactgcaactgttcctatattcgctgtggatgccggaggctgcatcaatggatggaacgctaagattgcagagttgacaggtctctcagttgaagaagctatggggaagtctctggtttctgatttaatatacaaagagaatgaagcaactgtcaataagcttctttctcgtgctttgagaggggacgaggaaaagaatgtggaggttaagctgaaaactttcagccccgaactacaagggaaagcagtttttgtggttgtgaatgcttgttccagcaaggactacttgaacaacattgtcggcgtttgttttgttggacaagacgttactagtcagaaaatcgtaatggataagttcatcaacatacaaggagattacaaggctattgtacatagcccaaaccctctaatcccgccaatttttgctgctgacgagaacacgtgctgcctggaatggaacatggcgatggaaaagcttacgggttggtctcgcagtgaagtgattgggaaaatgattgtcggggaagtgtttgggagctgttgcatgctaaagggtcctgatgctttaaccaagttcatgattgtattgcataatgcgattggtggccaagatacggataagttccctttcccattctttgaccgcaatgggaagtttgttcaggctctattgactgcaaacaagcgggttagcctcgagggaaaggttattggggctttctgtttcttgcaaatcccgagccctgagctgcagcaagctttagcagtccaacggaggcaggacacagagtgtttcacgaaggcaaaagagttggcttatatttgtcaggtgataaagaatcctttgagcggtatgcgtttcgcaaactcattgttggaggccacagacttgaacgaggaccagaagcagttacttgaaacaagtgtttcttgcgagaaacagatctcaaggatcgtcggggacatggatcttgaaagcattgaagacggttcatttgtgctaaagagggaagagtttttccttggaagtgtcataaacgcgattgtaagtcaagcgatgttcttattaagggacagaggtcttcagctgatccgtgacattcccgaagagatcaaatcaatagaggtttttggagaccagataaggattcaacagctcctggctgagtttctgctgagtataatccggtatgcaccatctcaagagtgggtggagatccatttaagccaactttcaaagcaaatggctgatggattcgccgccatccgcacagaattcagaatggcgtgtccaggtgaaggtctgcctccagagctagtccgagacatgttccatagcagcaggtggacaagccctgaaggtttaggtctaagcgtatgtcgaaagattttaaagctaatgaacggtgaggttcaatacatccgagaatcagaacggtcctatttcctcatcattctggaactccctgtacctcgaaagcgaccattgtcaactgctagtggaagtggtgacatgatgctgatgatgccatattagatggtttccggagtcgggggtagtggcggtggccgtggcggtggccgtggcggagaagaagaaccgtcgtcaagtcacactcctaataaccgaagaggaggagaacaagctcaatcgtcgggaacgaaatctctcagaccaagaagcaacactgaatcaatgagcaaagcaattcaacagtacaccgtcgacgcaagactccacgccgttttcgaacaatccggcgaatcagggaaatcattcgactactcacaatcactcaaaacgacgacgtacggttcctctgtacctgagcaacagatcacagcttatctctctcgaatccagcgaggtggttacattcagcctttcggatgtatgatcgccgtcgatgaatccagtttccggatcatcggttacagtgaaaacgccagagaaatgttagggattatgcctcaatctgttcctactcttgagaaacctgagattctagctatgggaactgatgtgagatctttgttcacttcttcgagctcgattctactcgagcgtgctttcgttgctcgagagattaccttgttaaatccggtttggatccattccaagaatactggtaaaccgttttacgccattcttcataggattgatgttggtgttgttattgatttagagccagctagaactgaagatcctgcgctttctattgctggtgctgttcaatcgcagaaactcgcggttcgtgcgatttctcagttacaggctcttcctggtggagatattaagcttttgtgtgacactgtcgtggaaagtgtgagggacttgactggttatgatcgtgttatggtttataagtttcatgaagatgagcatggagaagttgtagctgagagtaaacgagatgatttagagccttatattggactgcatgttcctgctactgatattcctcaagcgtcaaggttcttgtttaagcagaaccgtgtccgaatgatagtagattgcaatgccacacctgttcttgtggtccaggacgataggctaactcagtctatgtgcttggttggttctactcttagggctcctcatggttgtcactctcagtatatggctaacatgggatctattgcgtctttagcaatggcggttataatcaatggaaatgaagatgatgggagcaatgtagctagtggaagaagctcgatgaggctttggggtttggttgtttgccatcacacttcttctcgctgcataccgtttccgctaaggtatgcttgtgagtttttgatgcaggctttcggtttacagttaaacatggaattgcagttagctttgcaaatgtcagagaaacgcgttttgagaacgcagacactgttatgtgatatgcttctgcgtgactcgcctgctggaattgttacacagagtcccagtatcatggacttagtgaaatgtgacggtgcagcatttctttaccacgggaagtattacccgttgggtgttgctcctagtgaagttcagataaaagatgttgtggagtggttgcttgcgaatcatgcggattcaaccggattaagcactgatagtttaggcgatgcggggtatcccggtgcagctgcgttaggggatgctgtgtgcggtatggcagttgcatatatcacaaaaagagactttcttttttggtttcgatctcacactgcgaaagaaatcaaatggggaggcgctaagcatcatccggaggataaagatgatgggcaacgaatgcatcctcgttcgtcctttcaggcttttcttgaagttgttaagagccggagtcagccatgggaaactgcggaaatggatgcgattcactcgctccagcttattctgagagactcttttaaagaatctgaggcggctatgaactctaaagttgtggatggtgtggttcagccatgtagggatatggcgggggaacaggggattgatgagttaggtgcagttgcaagagagatggttaggctcattgagactgcaactgttcctatattcgctgtggatgccggaggctgcatcaatggatggaacgctaagattgcagagttgacaggtctctcagttgaagaagctatggggaagtctctggtttctgatttaatatacaaagagaatgaagcaactgtcaataagcttctttctcgtgctttgagaggggacgaggaaaagaatgtggaggttaagctgaaaactttcagccccgaactacaagggaaagcagtttttgtggttgtgaatgcttgttccagcaaggactacttgaacaacattgtcggcgtttgttttgttggacaagacgttactagtcagaaaatcgtaatggataagttcatcaacatacaaggagattacaaggctattgtacatagcccaaaccctctaatcccgccaatttttgctgctgacgagaacacgtgctgcctggaatggaacatggcgatggaaaagcttacgggttggtctcgcagtgaagtgattgggaaaatgattgtcggggaagtgtttgggagctgttgcatgctaaagggtcctgatgctttaaccaagttcatgattgtattgcataatgcgattggtggccaagatacggataagttccctttcccattctttgaccgcaatgggaagtttgttcaggctctattgactgcaaacaagcgggttagcctcgagggaaaggttattggggctttctgtttcttgcaaatcccgagccctgagctgcagcaagctttagcagtccaacggaggcaggacacagagtgtttcacgaaggcaaaagagttggcttatatttgtcaggtgataaagaatcctttgagcggtatgcgtttcgcaaactcattgttggaggccacagacttgaacgaggaccagaagcagttacttgaaacaagtgtttcttgcgagaaacagatctcaaggatcgtcggggacatggatcttgaaagcattgaagacggttcatttgtgctaaagagggaagagtttttccttggaagtgtcataaacgcgattgtaagtcaagcgatgttcttattaagggacagaggtcttcagctgatccgtgacattcccgaagagatcaaatcaatagaggtttttggagaccagataaggattcaacagctcctggctgagtttctgctgagtataatccggtatgcaccatctcaagagtgggtggagatccatttaagccaactttcaaagcaaatggctgatggattcgccgccatccgcacagaattcagaatggcgtgtccaggtgaaggtctgcctccagagctagtccgagacatgttccatagcagcaggtggacaagccctgaaggtttaggtctaagcgtatgtcgaaagattttaaagctaatgaacggtgaggttcaatacatccgagaatcagaacggtcctatttcctcatcattctggaactccctgtacctcgaaagcgaccattgtcaactgctagtggaagtggtgacatgatgctgatgatgccatattagatggtttccggagtcgggggtagtggcggtggccgtggcggtggccgtggcggagaagaagaaccgtcgtcaagtcacactcctaataaccgaagaggaggagaacaagctcaatcgtcgggaacgaaatctctcagaccaagaagcaacactgaatcaatgagcaaagcaattcaacagtacaccgtcgacgcaagactccacgccgttttcgaacaatccggcgaatcagggaaatcattcgactactcacaatcactcaaaacgacgacgtacggttcctctgtacctgagcaacagatcacagcttatctctctcgaatccagcgaggtggttacattcagcctttcggatgtatgatcgccgtcgatgaatccagtttccggatcatcggttacagtgaaaacgccagagaaatgttagggattatgcctcaatctgttcctactcttgagaaacctgagattctagctatgggaactgatgtgagatctttgttcacttcttcgagctcgattctactcgagcgtgctttcgttgctcgagagattaccttgttaaatccggtttggatccattccaagaatactggtaaaccgttttacgccattcttcataggattgatgttggtgttgttattgatttagagccagctagaactgaagatcctgcgctttctattgctggtgctgttcaatcgcagaaactcgcggttcgtgcgatttctcagttacaggctcttcctggtggagatattaagcttttgtgtgacactgtcgtggaaagtgtgagggacttgactggttatgatcgtgttatggtttataagtttcatgaagatgagcatggagaagttgtagctgagagtaaacgagatgatttagagccttatattggactgcatgttcctgctactgatattcctcaagcgtcaaggttcttgtttaagcagaaccgtgtccgaatgatagtagattgcaatgccacacctgttcttgtggtccaggacgataggctaactcagtctatgtgcttggttggttctactcttagggctcctcatggttgtcactctcagtatatggctaacatgggatctattgcgtctttagcaatggcggttataatcaatggaaatgaagatgatgggagcaatgtagctagtggaagaagctcgatgaggctttggggtttggttgtttgccatcacacttcttctcgctgcataccgtttccgctaaggtatgcttgtgagtttttgatgcaggctttcggtttacagttaaacatggaattgcagttagctttgcaaatgtcagagaaacgcgttttgagaacgcagacactgttatgtgatatgcttctgcgtgactcgcctgctggaattgttacacagagtcccagtatcatggacttagtgaaatgtgacggtgcagcatttctttaccacgggaagtattacccgttgggtgttgctcctagtgaagttcagataaaagatgttgtggagtggttgcttgcgaatcatgcggattcaaccggattaagcactgatagtttaggcgatgcggggtatcccggtgcagctgcgttaggggatgctgtgtgcggtatggcagttgcatatatcacaaaaagagactttcttttttggtttcgatctcacactgcgaaagaaatcaaatggggaggcgctaagcatcatccggaggataaagatgatgggcaacgaatgcatcctcgttcgtcctttcaggcttttcttgaagttgttaagagccggagtcagccatgggaaactgcggaaatggatgcgattcactcgctccagcttattctgagagactcttttaaagaatctgaggcggctatgaactctaaagttgtggatggtgtggttcagccatgtagggatatggcgggggaacaggggattgatgagttaggtgcagttgcaagagagatggttaggctcattgagactgcaactgttcctatattcgctgtggatgccggaggctgcatcaatggatggaacgctaagattgcagagttgacaggtctctcagttgaagaagctatggggaagtctctggtttctgatttaatatacaaagagaatgaagcaactgtcaataagcttctttctcgtgctttgagaggggacgaggaaaagaatgtggaggttaagctgaaaactttcagccccgaactacaagggaaagcagtttttgtggttgtgaatgcttgttccagcaaggactacttgaacaacattgtcggcgtttgttttgttggacaagacgttactagtcagaaaatcgtaatggataagttcatcaacatacaaggagattacaaggctattgtacatagcccaaaccctctaatcccgccaatttttgctgctgacgagaacacgtgctgcctggaatggaacatggcgatggaaaagcttacgggttggtctcgcagtgaagtgattgggaaaatgattgtcggggaagtgtttgggagctgttgcatgctaaagggtcctgatgctttaaccaagttcatgattgtattgcataatgcgattggtggccaagatacggataagttccctttcccattctttgaccgcaatgggaagtttgttcaggctctattgactgcaaacaagcgggttagcctcgagggaaaggttattggggctttctgtttcttgcaaatcccgagccctgagctgcagcaagctttagcagtccaacggaggcaggacacagagtgtttcacgaaggcaaaagagttggcttatatttgtcaggtgataaagaatcctttgagcggtatgcgtttcgcaaactcattgttggaggccacagacttgaacgaggaccagaagcagttacttgaaacaagtgtttcttgcgagaaacagatctcaaggatcgtcggggacatggatcttgaaagcattgaagacggttcatttgtgctaaagagggaagagtttttccttggaagtgtcataaacgcgattgtaagtcaagcgatgttcttattaagggacagaggtcttcagctgatccgtgacattcccgaagagatcaaatcaatagaggtttttggagaccagataaggattcaacagctcctggctgagtttctgctgagtataatccggtatgcaccatctcaagagtgggtggagatccatttaagccaactttcaaagcaaatggctgatggattcgccgccatccgcacagaattcagaatggcgtgtccaggtgaaggtctgcctccagagctagtccgagacatgttccatagcagcaggtggacaagccctgaaggtttaggtctaagcgtatgtcgaaagattttaaagctaatgaacggtgaggttcaatacatccgagaatcagaacggtcctatttcctcatcattctggaactccctgtacctcgaaagcgaccattgtcaactgctagtggaagtggtgacatgatgctgatgatgccatattagatggtttccggagtcgggggtagtggcggtggccgtggcggtggccgtggcggagaagaagaaccgtcgtcaagtcacactcctaataaccgaagaggaggagaacaagctcaatcgtcgggaacgaaatctctcagaccaagaagcaacactgaatcaatgagcaaagcaattcaacagtacaccgtcgacgcaagactccacgccgttttcgaacaatccggcgaatcagggaaatcattcgactactcacaatcactcaaaacgacgacgtacggttcctctgtacctgagcaacagatcacagcttatctctctcgaatccagcgaggtggttacattcagcctttcggatgtatgatcgccgtcgatgaatccagtttccggatcatcggttacagtgaaaacgccagagaaatgttagggattatgcctcaatctgttcctactcttgagaaacctgagattctagctatgggaactgatgtgagatctttgttcacttcttcgagctcgattctactcgagcgtgctttcgttgctcgagagattaccttgttaaatccggtttggatccattccaagaatactggtaaaccgttttacgccattcttcataggattgatgttggtgttgttattgatttagagccagctagaactgaagatcctgcgctttctattgctggtgctgttcaatcgcagaaactcgcggttcgtgcgatttctcagttacaggctcttcctggtggagatattaagcttttgtgtgacactgtcgtggaaagtgtgagggacttgactggttatgatcgtgttatggtttataagtttcatgaagatgagcatggagaagttgtagctgagagtaaacgagatgatttagagccttatattggactgcatgttcctgctactgatattcctcaagcgtcaaggttcttgtttaagcagaaccgtgtccgaatgatagtagattgcaatgccacacctgttcttgtggtccaggacgataggctaactcagtctatgtgcttggttggttctactcttagggctcctcatggttgtcactctcagtatatggctaacatgggatctattgcgtctttagcaatggcggttataatcaatggaaatgaagatgatgggagcaatgtagctagtggaagaagctcgatgaggctttggggtttggttgtttgccatcacacttcttctcgctgcataccgtttccgctaaggtatgcttgtgagtttttgatgcaggctttcggtttacagttaaacatggaattgcagttagctttgcaaatgtcagagaaacgcgttttgagaacgcagacactgttatgtgatatgcttctgcgtgactcgcctgctggaattgttacacagagtcccagtatcatggacttagtgaaatgtgacggtgcagcatttctttaccacgggaagtattacccgttgggtgttgctcctagtgaagttcagataaaagatgttgtggagtggttgcttgcgaatcatgcggattcaaccggattaagcactgatagtttaggcgatgcggggtatcccggtgcagctgcgttaggggatgctgtgtgcggtatggcagttgcatatatcacaaaaagagactttcttttttggtttcgatctcacactgcgaaagaaatcaaatggggaggcgctaagcatcatccggaggataaagatgatgggcaacgaatgcatcctcgttcgtcctttcaggcttttcttgaagttgttaagagccggagtcagccatgggaaactgcggaaatggatgcgattcactcgctccagcttattctgagagactcttttaaagaatctgaggcggctatgaactctaaagttgtggatggtgtggttcagccatgtagggatatggcgggggaacaggggattgatgagttaggtgcagttgcaagagagatggttaggctcattgagactgcaactgttcctatattcgctgtggatgccggaggctgcatcaatggatggaacgctaagattgcagagttgacaggtctctcagttgaagaagctatggggaagtctctggtttctgatttaatatacaaagagaatgaagcaactgtcaataagcttctttctcgtgctttgagaggggacgaggaaaagaatgtggaggttaagctgaaaactttcagccccgaactacaagggaaagcagtttttgtggttgtgaatgcttgttccagcaaggactacttgaacaacattgtcggcgtttgttttgttggacaagacgttactagtcagaaaatcgtaatggataagttcatcaacatacaaggagattacaaggctattgtacatagcccaaaccctctaatcccgccaatttttgctgctgacgagaacacgtgctgcctggaatggaacatggcgatggaaaagcttacgggttggtctcgcagtgaagtgattgggaaaatgattgtcggggaagtgtttgggagctgttgcatgctaaagggtcctgatgctttaaccaagttcatgattgtattgcataatgcgattggtggccaagatacggataagttccctttcccattctttgaccgcaatgggaagtttgttcaggctctattgactgcaaacaagcgggttagcctcgagggaaaggttattggggctttctgtttcttgcaaatcccgagccctgagctgcagcaagctttagcagtccaacggaggcaggacacagagtgtttcacgaaggcaaaagagttggcttatatttgtcaggtgataaagaatcctttgagcggtatgcgtttcgcaaactcattgttggaggccacagacttgaacgaggaccagaagcagttacttgaaacaagtgtttcttgcgagaaacagatctcaaggatcgtcggggacatggatcttgaaagcattgaagacggttcatttgtgctaaagagggaagagtttttccttggaagtgtcataaacgcgattgtaagtcaagcgatgttcttattaagggacagaggtcttcagctgatccgtgacattcccgaagagatcaaatcaatagaggtttttggagaccagataaggattcaacagctcctggctgagtttctgctgagtataatccggtatgcaccatctcaagagtgggtggagatccatttaagccaactttcaaagcaaatggctgatggattcgccgccatccgcacagaattcagaatggcgtgtccaggtgaaggtctgcctccagagctagtccgagacatgttccatagcagcaggtggacaagccctgaaggtttaggtctaagcgtatgtcgaaagattttaaagctaatgaacggtgaggttcaatacatccgagaatcagaacggtcctatttcctcatcattctggaactccctgtacctcgaaagcgaccattgtcaactgctagtggaagtggtgacatgatgctgatgatgccatattagatggtttccggagtcgggggtagtggcggtggccgtggcggtggccgtggcggagaagaagaaccgtcgtcaagtcacactcctaataaccgaagaggaggagaacaagctcaatcgtcgggaacgaaatctctcagaccaagaagcaacactgaatcaatgagcaaagcaattcaacagtacaccgtcgacgcaagactccacgccgttttcgaacaatccggcgaatcagggaaatcattcgactactcacaatcactcaaaacgacgacgtacggttcctctgtacctgagcaacagatcacagcttatctctctcgaatccagcgaggtggttacattcagcctttcggatgtatgatcgccgtcgatgaatccagtttccggatcatcggttacagtgaaaacgccagagaaatgttagggattatgcctcaatctgttcctactcttgagaaacctgagattctagctatgggaactgatgtgagatctttgttcacttcttcgagctcgattctactcgagcgtgctttcgttgctcgagagattaccttgttaaatccggtttggatccattccaagaatactggtaaaccgttttacgccattcttcataggattgatgttggtgttgttattgatttagagccagctagaactgaagatcctgcgctttctattgctggtgctgttcaatcgcagaaactcgcggttcgtgcgatttctcagttacaggctcttcctggtggagatattaagcttttgtgtgacactgtcgtggaaagtgtgagggacttgactggttatgatcgtgttatggtttataagtttcatgaagatgagcatggagaagttgtagctgagagtaaacgagatgatttagagccttatattggactgcatgttcctgctactgatattcctcaagcgtcaaggttcttgtttaagcagaaccgtgtccgaatgatagtagattgcaatgccacacctgttcttgtggtccaggacgataggctaactcagtctatgtgcttggttggttctactcttagggctcctcatggttgtcactctcagtatatggctaacatgggatctattgcgtctttagcaatggcggttataatcaatggaaatgaagatgatgggagcaatgtagctagtggaagaagctcgatgaggctttggggtttggttgtttgccatcacacttcttctcgctgcataccgtttccgctaaggtatgcttgtgagtttttgatgcaggctttcggtttacagttaaacatggaattgcagttagctttgcaaatgtcagagaaacgcgttttgagaacgcagacactgttatgtgatatgcttctgcgtgactcgcctgctggaattgttacacagagtcccagtatcatggacttagtgaaatgtgacggtgcagcatttctttaccacgggaagtattacccgttgggtgttgctcctagtgaagttcagataaaagatgttgtggagtggttgcttgcgaatcatgcggattcaaccggattaagcactgatagtttaggcgatgcggggtatcccggtgcagctgcgttaggggatgctgtgtgcggtatggcagttgcatatatcacaaaaagagactttcttttttggtttcgatctcacactgcgaaagaaatcaaatggggaggcgctaagcatcatccggaggataaagatgatgggcaacgaatgcatcctcgttcgtcctttcaggcttttcttgaagttgttaagagccggagtcagccatgggaaactgcggaaatggatgcgattcactcgctccagcttattctgagagactcttttaaagaatctgaggcggctatgaactctaaagttgtggatggtgtggttcagccatgtagggatatggcgggggaacaggggattgatgagttaggtgcagttgcaagagagatggttaggctcattgagactgcaactgttcctatattcgctgtggatgccggaggctgcatcaatggatggaacgctaagattgcagagttgacaggtctctcagttgaagaagctatggggaagtctctggtttctgatttaatatacaaagagaatgaagcaactgtcaataagcttctttctcgtgctttgagaggggacgaggaaaagaatgtggaggttaagctgaaaactttcagccccgaactacaagggaaagcagtttttgtggttgtgaatgcttgttccagcaaggactacttgaacaacattgtcggcgtttgttttgttggacaagacgttactagtcagaaaatcgtaatggataagttcatcaacatacaaggagattacaaggctattgtacatagcccaaaccctctaatcccgccaatttttgctgctgacgagaacacgtgctgcctggaatggaacatggcgatggaaaagcttacgggttggtctcgcagtgaagtgattgggaaaatgattgtcggggaagtgtttgggagctgttgcatgctaaagggtcctgatgctttaaccaagttcatgattgtattgcataatgcgattggtggccaagatacggataagttccctttcccattctttgaccgcaatgggaagtttgttcaggctctattgactgcaaacaagcgggttagcctcgagggaaaggttattggggctttctgtttcttgcaaatcccgagccctgagctgcagcaagctttagcagtccaacggaggcaggacacagagtgtttcacgaaggcaaaagagttggcttatatttgtcaggtgataaagaatcctttgagcggtatgcgtttcgcaaactcattgttggaggccacagacttgaacgaggaccagaagcagttacttgaaacaagtgtttcttgcgagaaacagatctcaaggatcgtcggggacatggatcttgaaagcattgaagacggttcatttgtgctaaagagggaagagtttttccttggaagtgtcataaacgcgattgtaagtcaagcgatgttcttattaagggacagaggtcttcagctgatccgtgacattcccgaagagatcaaatcaatagaggtttttggagaccagataaggattcaacagctcctggctgagtttctgctgagtataatccggtatgcaccatctcaagagtgggtggagatccatttaagccaactttcaaagcaaatggctgatggattcgccgccatccgcacagaattcagaatggcgtgtccaggtgaaggtctgcctccagagctagtccgagacatgttccatagcagcaggtggacaagccctgaaggtttaggtctaagcgtatgtcgaaagattttaaagctaatgaacggtgaggttcaatacatccgagaatcagaacggtcctatttcctcatcattctggaactccctgtacctcgaaagcgaccattgtcaactgctagtggaagtggtgacatgatgctgatgatgccatattagatggtttccggagtcgggggtagtggcggtggccgtggcggtggccgtggcggagaagaagaaccgtcgtcaagtcacactcctaataaccgaagaggaggagaacaagctcaatcgtcgggaacgaaatctctcagaccaagaagcaacactgaatcaatgagcaaagcaattcaacagtacaccgtcgacgcaagactccacgccgttttcgaacaatccggcgaatcagggaaatcattcgactactcacaatcactcaaaacgacgacgtacggttcctctgtacctgagcaacagatcacagcttatctctctcgaatccagcgaggtggttacattcagcctttcggatgtatgatcgccgtcgatgaatccagtttccggatcatcggttacagtgaaaacgccagagaaatgttagggattatgcctcaatctgttcctactcttgagaaacctgagattctagctatgggaactgatgtgagatctttgttcacttcttcgagctcgattctactcgagcgtgctttcgttgctcgagagattaccttgttaaatccggtttggatccattccaagaatactggtaaaccgttttacgccattcttcataggattgatgttggtgttgttattgatttagagccagctagaactgaagatcctgcgctttctattgctggtgctgttcaatcgcagaaactcgcggttcgtgcgatttctcagttacaggctcttcctggtggagatattaagcttttgtgtgacactgtcgtggaaagtgtgagggacttgactggttatgatcgtgttatggtttataagtttcatgaagatgagcatggagaagttgtagctgagagtaaacgagatgatttagagccttatattggactgcatgttcctgctactgatattcctcaagcgtcaaggttcttgtttaagcagaaccgtgtccgaatgatagtagattgcaatgccacacctgttcttgtggtccaggacgataggctaactcagtctatgtgcttggttggttctactcttagggctcctcatggttgtcactctcagtatatggctaacatgggatctattgcgtctttagcaatggcggttataatcaatggaaatgaagatgatgggagcaatgtagctagtggaagaagctcgatgaggctttggggtttggttgtttgccatcacacttcttctcgctgcataccgtttccgctaaggtatgcttgtgagtttttgatgcaggctttcggtttacagttaaacatggaattgcagttagctttgcaaatgtcagagaaacgcgttttgagaacgcagacactgttatgtgatatgcttctgcgtgactcgcctgctggaattgttacacagagtcccagtatcatggacttagtgaaatgtgacggtgcagcatttctttaccacgggaagtattacccgttgggtgttgctcctagtgaagttcagataaaagatgttgtggagtggttgcttgcgaatcatgcggattcaaccggattaagcactgatagtttaggcgatgcggggtatcccggtgcagctgcgttaggggatgctgtgtgcggtatggcagttgcatatatcacaaaaagagactttcttttttggtttcgatctcacactgcgaaagaaatcaaatggggaggcgctaagcatcatccggaggataaagatgatgggcaacgaatgcatcctcgttcgtcctttcaggcttttcttgaagttgttaagagccggagtcagccatgggaaactgcggaaatggatgcgattcactcgctccagcttattctgagagactcttttaaagaatctgaggcggctatgaactctaaagttgtggatggtgtggttcagccatgtagggatatggcgggggaacaggggattgatgagttaggtgcagttgcaagagagatggttaggctcattgagactgcaactgttcctatattcgctgtggatgccggaggctgcatcaatggatggaacgctaagattgcagagttgacaggtctctcagttgaagaagctatggggaagtctctggtttctgatttaatatacaaagagaatgaagcaactgtcaataagcttctttctcgtgctttgagaggggacgaggaaaagaatgtggaggttaagctgaaaactttcagccccgaactacaagggaaagcagtttttgtggttgtgaatgcttgttccagcaaggactacttgaacaacattgtcggcgtttgttttgttggacaagacgttactagtcagaaaatcgtaatggataagttcatcaacatacaaggagattacaaggctattgtacatagcccaaaccctctaatcccgccaatttttgctgctgacgagaacacgtgctgcctggaatggaacatggcgatggaaaagcttacgggttggtctcgcagtgaagtgattgggaaaatgattgtcggggaagtgtttgggagctgttgcatgctaaagggtcctgatgctttaaccaagttcatgattgtattgcataatgcgattggtggccaagatacggataagttccctttcccattctttgaccgcaatgggaagtttgttcaggctctattgactgcaaacaagcgggttagcctcgagggaaaggttattggggctttctgtttcttgcaaatcccgagccctgagctgcagcaagctttagcagtccaacggaggcaggacacagagtgtttcacgaaggcaaaagagttggcttatatttgtcaggtgataaagaatcctttgagcggtatgcgtttcgcaaactcattgttggaggccacagacttgaacgaggaccagaagcagttacttgaaacaagtgtttcttgcgagaaacagatctcaaggatcgtcggggacatggatcttgaaagcattgaagacggttcatttgtgctaaagagggaagagtttttccttggaagtgtcataaacgcgattgtaagtcaagcgatgttcttattaagggacagaggtcttcagctgatccgtgacattcccgaagagatcaaatcaatagaggtttttggagaccagataaggattcaacagctcctggctgagtttctgctgagtataatccggtatgcaccatctcaagagtgggtggagatccatttaagccaactttcaaagcaaatggctgatggattcgccgccatccgcacagaattcagaatggcgtgtccaggtgaaggtctgcctccagagctagtccgagacatgttccatagcagcaggtggacaagccctgaaggtttaggtctaagcgtatgtcgaaagattttaaagctaatgaacggtgaggttcaatacatccgagaatcagaacggtcctatttcctcatcattctggaactccctgtacctcgaaagcgaccattgtcaactgctagtggaagtggtgacatgatgctgatgatgccatattagatggtttccggagtcgggggtagtggcggtggccgtggcggtggccgtggcggagaagaagaaccgtcgtcaagtcacactcctaataaccgaagaggaggagaacaagctcaatcgtcgggaacgaaatctctcagaccaagaagcaacactgaatcaatgagcaaagcaattcaacagtacaccgtcgacgcaagactccacgccgttttcgaacaatccggcgaatcagggaaatcattcgactactcacaatcactcaaaacgacgacgtacggttcctctgtacctgagcaacagatcacagcttatctctctcgaatccagcgaggtggttacattcagcctttcggatgtatgatcgccgtcgatgaatccagtttccggatcatcggttacagtgaaaacgccagagaaatgttagggattatgcctcaatctgttcctactcttgagaaacctgagattctagctatgggaactgatgtgagatctttgttcacttcttcgagctcgattctactcgagcgtgctttcgttgctcgagagattaccttgttaaatccggtttggatccattccaagaatactggtaaaccgttttacgccattcttcataggattgatgttggtgttgttattgatttagagccagctagaactgaagatcctgcgctttctattgctggtgctgttcaatcgcagaaactcgcggttcgtgcgatttctcagttacaggctcttcctggtggagatattaagcttttgtgtgacactgtcgtggaaagtgtgagggacttgactggttatgatcgtgttatggtttataagtttcatgaagatgagcatggagaagttgtagctgagagtaaacgagatgatttagagccttatattggactgcatgttcctgctactgatattcctcaagcgtcaaggttcttgtttaagcagaaccgtgtccgaatgatagtagattgcaatgccacacctgttcttgtggtccaggacgataggctaactcagtctatgtgcttggttggttctactcttagggctcctcatggttgtcactctcagtatatggctaacatgggatctattgcgtctttagcaatggcggttataatcaatggaaatgaagatgatgggagcaatgtagctagtggaagaagctcgatgaggctttggggtttggttgtttgccatcacacttcttctcgctgcataccgtttccgctaaggtatgcttgtgagtttttgatgcaggctttcggtttacagttaaacatggaattgcagttagctttgcaaatgtcagagaaacgcgttttgagaacgcagacactgttatgtgatatgcttctgcgtgactcgcctgctggaattgttacacagagtcccagtatcatggacttagtgaaatgtgacggtgcagcatttctttaccacgggaagtattacccgttgggtgttgctcctagtgaagttcagataaaagatgttgtggagtggttgcttgcgaatcatgcggattcaaccggattaagcactgatagtttaggcgatgcggggtatcccggtgcagctgcgttaggggatgctgtgtgcggtatggcagttgcatatatcacaaaaagagactttcttttttggtttcgatctcacactgcgaaagaaatcaaatggggaggcgctaagcatcatccggaggataaagatgatgggcaacgaatgcatcctcgttcgtcctttcaggcttttcttgaagttgttaagagccggagtcagccatgggaaactgcggaaatggatgcgattcactcgctccagcttattctgagagactcttttaaagaatctgaggcggctatgaactctaaagttgtggatggtgtggttcagccatgtagggatatggcgggggaacaggggattgatgagttaggtgcagttgcaagagagatggttaggctcattgagactgcaactgttcctatattcgctgtggatgccggaggctgcatcaatggatggaacgctaagattgcagagttgacaggtctctcagttgaagaagctatggggaagtctctggtttctgatttaatatacaaagagaatgaagcaactgtcaataagcttctttctcgtgctttgagaggggacgaggaaaagaatgtggaggttaagctgaaaactttcagccccgaactacaagggaaagcagtttttgtggttgtgaatgcttgttccagcaaggactacttgaacaacattgtcggcgtttgttttgttggacaagacgttactagtcagaaaatcgtaatggataagttcatcaacatacaaggagattacaaggctattgtacatagcccaaaccctctaatcccgccaatttttgctgctgacgagaacacgtgctgcctggaatggaacatggcgatggaaaagcttacgggttggtctcgcagtgaagtgattgggaaaatgattgtcggggaagtgtttgggagctgttgcatgctaaagggtcctgatgctttaaccaagttcatgattgtattgcataatgcgattggtggccaagatacggataagttccctttcccattctttgaccgcaatgggaagtttgttcaggctctattgactgcaaacaagcgggttagcctcgagggaaaggttattggggctttctgtttcttgcaaatcccgagccctgagctgcagcaagctttagcagtccaacggaggcaggacacagagtgtttcacgaaggcaaaagagttggcttatatttgtcaggtgataaagaatcctttgagcggtatgcgtttcgcaaactcattgttggaggccacagacttgaacgaggaccagaagcagttacttgaaacaagtgtttcttgcgagaaacagatctcaaggatcgtcggggacatggatcttgaaagcattgaagacggttcatttgtgctaaagagggaagagtttttccttggaagtgtcataaacgcgattgtaagtcaagcgatgttcttattaagggacagaggtcttcagctgatccgtgacattcccgaagagatcaaatcaatagaggtttttggagaccagataaggattcaacagctcctggctgagtttctgctgagtataatccggtatgcaccatctcaagagtgggtggagatccatttaagccaactttcaaagcaaatggctgatggattcgccgccatccgcacagaattcagaatggcgtgtccaggtgaaggtctgcctccagagctagtccgagacatgttccatagcagcaggtggacaagccctgaaggtttaggtctaagcgtatgtcgaaagattttaaagctaatgaacggtgaggttcaatacatccgagaatcagaacggtcctatttcctcatcattctggaactccctgtacctcgaaagcgaccattgtcaactgctagtggaagtggtgacatgatgctgatgatgccatattagatggtttccggagtcgggggtagtggcggtggccgtggcggtggccgtggcggagaagaagaaccgtcgtcaagtcacactcctaataaccgaagaggaggagaacaagctcaatcgtcgggaacgaaatctctcagaccaagaagcaacactgaatcaatgagcaaagcaattcaacagtacaccgtcgacgcaagactccacgccgttttcgaacaatccggcgaatcagggaaatcattcgactactcacaatcactcaaaacgacgacgtacggttcctctgtacctgagcaacagatcacagcttatctctctcgaatccagcgaggtggttacattcagcctttcggatgtatgatcgccgtcgatgaatccagtttccggatcatcggttacagtgaaaacgccagagaaatgttagggattatgcctcaatctgttcctactcttgagaaacctgagattctagctatgggaactgatgtgagatctttgttcacttcttcgagctcgattctactcgagcgtgctttcgttgctcgagagattaccttgttaaatccggtttggatccattccaagaatactggtaaaccgttttacgccattcttcataggattgatgttggtgttgttattgatttagagccagctagaactgaagatcctgcgctttctattgctggtgctgttcaatcgcagaaactcgcggttcgtgcgatttctcagttacaggctcttcctggtggagatattaagcttttgtgtgacactgtcgtggaaagtgtgagggacttgactggttatgatcgtgttatggtttataagtttcatgaagatgagcatggagaagttgtagctgagagtaaacgagatgatttagagccttatattggactgcatgttcctgctactgatattcctcaagcgtcaaggttcttgtttaagcagaaccgtgtccgaatgatagtagattgcaatgccacacctgttcttgtggtccaggacgataggctaactcagtctatgtgcttggttggttctactcttagggctcctcatggttgtcactctcagtatatggctaacatgggatctattgcgtctttagcaatggcggttataatcaatggaaatgaagatgatgggagcaatgtagctagtggaagaagctcgatgaggctttggggtttggttgtttgccatcacacttcttctcgctgcataccgtttccgctaaggtatgcttgtgagtttttgatgcaggctttcggtttacagttaaacatggaattgcagttagctttgcaaatgtcagagaaacgcgttttgagaacgcagacactgttatgtgatatgcttctgcgtgactcgcctgctggaattgttacacagagtcccagtatcatggacttagtgaaatgtgacggtgcagcatttctttaccacgggaagtattacccgttgggtgttgctcctagtgaagttcagataaaagatgttgtggagtggttgcttgcgaatcatgcggattcaaccggattaagcactgatagtttaggcgatgcggggtatcccggtgcagctgcgttaggggatgctgtgtgcggtatggcagttgcatatatcacaaaaagagactttcttttttggtttcgatctcacactgcgaaagaaatcaaatggggaggcgctaagcatcatccggaggataaagatgatgggcaacgaatgcatcctcgttcgtcctttcaggcttttcttgaagttgttaagagccggagtcagccatgggaaactgcggaaatggatgcgattcactcgctccagcttattctgagagactcttttaaagaatctgaggcggctatgaactctaaagttgtggatggtgtggttcagccatgtagggatatggcgggggaacaggggattgatgagttaggtgcagttgcaagagagatggttaggctcattgagactgcaactgttcctatattcgctgtggatgccggaggctgcatcaatggatggaacgctaagattgcagagttgacaggtctctcagttgaagaagctatggggaagtctctggtttctgatttaatatacaaagagaatgaagcaactgtcaataagcttctttctcgtgctttgagaggggacgaggaaaagaatgtggaggttaagctgaaaactttcagccccgaactacaagggaaagcagtttttgtggttgtgaatgcttgttccagcaaggactacttgaacaacattgtcggcgtttgttttgttggacaagacgttactagtcagaaaatcgtaatggataagttcatcaacatacaaggagattacaaggctattgtacatagcccaaaccctctaatcccgccaatttttgctgctgacgagaacacgtgctgcctggaatggaacatggcgatggaaaagcttacgggttggtctcgcagtgaagtgattgggaaaatgattgtcggggaagtgtttgggagctgttgcatgctaaagggtcctgatgctttaaccaagttcatgattgtattgcataatgcgattggtggccaagatacggataagttccctttcccattctttgaccgcaatgggaagtttgttcaggctctattgactgcaaacaagcgggttagcctcgagggaaaggttattggggctttctgtttcttgcaaatcccgagccctgagctgcagcaagctttagcagtccaacggaggcaggacacagagtgtttcacgaaggcaaaagagttggcttatatttgtcaggtgataaagaatcctttgagcggtatgcgtttcgcaaactcattgttggaggccacagacttgaacgaggaccagaagcagttacttgaaacaagtgtttcttgcgagaaacagatctcaaggatcgtcggggacatggatcttgaaagcattgaagacggttcatttgtgctaaagagggaagagtttttccttggaagtgtcataaacgcgattgtaagtcaagcgatgttcttattaagggacagaggtcttcagctgatccgtgacattcccgaagagatcaaatcaatagaggtttttggagaccagataaggattcaacagctcctggctgagtttctgctgagtataatccggtatgcaccatctcaagagtgggtggagatccatttaagccaactttcaaagcaaatggctgatggattcgccgccatccgcacagaattcagaatggcgtgtccaggtgaaggtctgcctccagagctagtccgagacatgttccatagcagcaggtggacaagccctgaaggtttaggtctaagcgtatgtcgaaagattttaaagctaatgaacggtgaggttcaatacatccgagaatcagaacggtcctatttcctcatcattctggaactccctgtacctcgaaagcgaccattgtcaactgctagtggaagtggtgacatgatgctgatgatgccatattagatggtttccggagtcgggggtagtggcggtggccgtggcggtggccgtggcggagaagaagaaccgtcgtcaagtcacactcctaataaccgaagaggaggagaacaagctcaatcgtcgggaacgaaatctctcagaccaagaagcaacactgaatcaatgagcaaagcaattcaacagtacaccgtcgacgcaagactccacgccgttttcgaacaatccggcgaatcagggaaatcattcgactactcacaatcactcaaaacgacgacgtacggttcctctgtacctgagcaacagatcacagcttatctctctcgaatccagcgaggtggttacattcagcctttcggatgtatgatcgccgtcgatgaatccagtttccggatcatcggttacagtgaaaacgccagagaaatgttagggattatgcctcaatctgttcctactcttgagaaacctgagattctagctatgggaactgatgtgagatctttgttcacttcttcgagctcgattctactcgagcgtgctttcgttgctcgagagattaccttgttaaatccggtttggatccattccaagaatactggtaaaccgttttacgccattcttcataggattgatgttggtgttgttattgatttagagccagctagaactgaagatcctgcgctttctattgctggtgctgttcaatcgcagaaactcgcggttcgtgcgatttctcagttacaggctcttcctggtggagatattaagcttttgtgtgacactgtcgtggaaagtgtgagggacttgactggttatgatcgtgttatggtttataagtttcatgaagatgagcatggagaagttgtagctgagagtaaacgagatgatttagagccttatattggactgcatgttcctgctactgatattcctcaagcgtcaaggttcttgtttaagcagaaccgtgtccgaatgatagtagattgcaatgccacacctgttcttgtggtccaggacgataggctaactcagtctatgtgcttggttggttctactcttagggctcctcatggttgtcactctcagtatatggctaacatgggatctattgcgtctttagcaatggcggttataatcaatggaaatgaagatgatgggagcaatgtagctagtggaagaagctcgatgaggctttggggtttggttgtttgccatcacacttcttctcgctgcataccgtttccgctaaggtatgcttgtgagtttttgatgcaggctttcggtttacagttaaacatggaattgcagttagctttgcaaatgtcagagaaacgcgttttgagaacgcagacactgttatgtgatatgcttctgcgtgactcgcctgctggaattgttacacagagtcccagtatcatggacttagtgaaatgtgacggtgcagcatttctttaccacgggaagtattacccgttgggtgttgctcctagtgaagttcagataaaagatgttgtggagtggttgcttgcgaatcatgcggattcaaccggattaagcactgatagtttaggcgatgcggggtatcccggtgcagctgcgttaggggatgctgtgtgcggtatggcagttgcatatatcacaaaaagagactttcttttttggtttcgatctcacactgcgaaagaaatcaaatggggaggcgctaagcatcatccggaggataaagatgatgggcaacgaatgcatcctcgttcgtcctttcaggcttttcttgaagttgttaagagccggagtcagccatgggaaactgcggaaatggatgcgattcactcgctccagcttattctgagagactcttttaaagaatctgaggcggctatgaactctaaagttgtggatggtgtggttcagccatgtagggatatggcgggggaacaggggattgatgagttaggtgcagttgcaagagagatggttaggctcattgagactgcaactgttcctatattcgctgtggatgccggaggctgcatcaatggatggaacgctaagattgcagagttgacaggtctctcagttgaagaagctatggggaagtctctggtttctgatttaatatacaaagagaatgaagcaactgtcaataagcttctttctcgtgctttgagaggggacgaggaaaagaatgtggaggttaagctgaaaactttcagccccgaactacaagggaaagcagtttttgtggttgtgaatgcttgttccagcaaggactacttgaacaacattgtcggcgtttgttttgttggacaagacgttactagtcagaaaatcgtaatggataagttcatcaacatacaaggagattacaaggctattgtacatagcccaaaccctctaatcccgccaatttttgctgctgacgagaacacgtgctgcctggaatggaacatggcgatggaaaagcttacgggttggtctcgcagtgaagtgattgggaaaatgattgtcggggaagtgtttgggagctgttgcatgctaaagggtcctgatgctttaaccaagttcatgattgtattgcataatgcgattggtggccaagatacggataagttccctttcccattctttgaccgcaatgggaagtttgttcaggctctattgactgcaaacaagcgggttagcctcgagggaaaggttattggggctttctgtttcttgcaaatcccgagccctgagctgcagcaagctttagcagtccaacggaggcaggacacagagtgtttcacgaaggcaaaagagttggcttatatttgtcaggtgataaagaatcctttgagcggtatgcgtttcgcaaactcattgttggaggccacagacttgaacgaggaccagaagcagttacttgaaacaagtgtttcttgcgagaaacagatctcaaggatcgtcggggacatggatcttgaaagcattgaagacggttcatttgtgctaaagagggaagagtttttccttggaagtgtcataaacgcgattgtaagtcaagcgatgttcttattaagggacagaggtcttcagctgatccgtgacattcccgaagagatcaaatcaatagaggtttttggagaccagataaggattcaacagctcctggctgagtttctgctgagtataatccggtatgcaccatctcaagagtgggtggagatccatttaagccaactttcaaagcaaatggctgatggattcgccgccatccgcacagaattcagaatggcgtgtccaggtgaaggtctgcctccagagctagtccgagacatgttccatagcagcaggtggacaagccctgaaggtttaggtctaagcgtatgtcgaaagattttaaagctaatgaacggtgaggttcaatacatccgagaatcagaacggtcctatttcctcatcattctggaactccctgtacctcgaaagcgaccattgtcaactgctagtggaagtggtgacatgatgctgatgatgccatattagatggtttccggagtcgggggtagtggcggtggccgtggcggtggccgtggcggagaagaagaaccgtcgtcaagtcacactcctaataaccgaagaggaggagaacaagctcaatcgtcgggaacgaaatctctcagaccaagaagcaacactgaatcaatgagcaaagcaattcaacagtacaccgtcgacgcaagactccacgccgttttcgaacaatccggcgaatcagggaaatcattcgactactcacaatcactcaaaacgacgacgtacggttcctctgtacctgagcaacagatcacagcttatctctctcgaatccagcgaggtggttacattcagcctttcggatgtatgatcgccgtcgatgaatccagtttccggatcatcggttacagtgaaaacgccagagaaatgttagggattatgcctcaatctgttcctactcttgagaaacctgagattctagctatgggaactgatgtgagatctttgttcacttcttcgagctcgattctactcgagcgtgctttcgttgctcgagagattaccttgttaaatccggtttggatccattccaagaatactggtaaaccgttttacgccattcttcataggattgatgttggtgttgttattgatttagagccagctagaactgaagatcctgcgctttctattgctggtgctgttcaatcgcagaaactcgcggttcgtgcgatttctcagttacaggctcttcctggtggagatattaagcttttgtgtgacactgtcgtggaaagtgtgagggacttgactggttatgatcgtgttatggtttataagtttcatgaagatgagcatggagaagttgtagctgagagtaaacgagatgatttagagccttatattggactgcatgttcctgctactgatattcctcaagcgtcaaggttcttgtttaagcagaaccgtgtccgaatgatagtagattgcaatgccacacctgttcttgtggtccaggacgataggctaactcagtctatgtgcttggttggttctactcttagggctcctcatggttgtcactctcagtatatggctaacatgggatctattgcgtctttagcaatggcggttataatcaatggaaatgaagatgatgggagcaatgtagctagtggaagaagctcgatgaggctttggggtttggttgtttgccatcacacttcttctcgctgcataccgtttccgctaaggtatgcttgtgagtttttgatgcaggctttcggtttacagttaaacatggaattgcagttagctttgcaaatgtcagagaaacgcgttttgagaacgcagacactgttatgtgatatgcttctgcgtgactcgcctgctggaattgttacacagagtcccagtatcatggacttagtgaaatgtgacggtgcagcatttctttaccacgggaagtattacccgttgggtgttgctcctagtgaagttcagataaaagatgttgtggagtggttgcttgcgaatcatgcggattcaaccggattaagcactgatagtttaggcgatgcggggtatcccggtgcagctgcgttaggggatgctgtgtgcggtatggcagttgcatatatcacaaaaagagactttcttttttggtttcgatctcacactgcgaaagaaatcaaatggggaggcgctaagcatcatccggaggataaagatgatgggcaacgaatgcatcctcgttcgtcctttcaggcttttcttgaagttgttaagagccggagtcagccatgggaaactgcggaaatggatgcgattcactcgctccagcttattctgagagactcttttaaagaatctgaggcggctatgaactctaaagttgtggatggtgtggttcagccatgtagggatatggcgggggaacaggggattgatgagttaggtgcagttgcaagagagatggttaggctcattgagactgcaactgttcctatattcgctgtggatgccggaggctgcatcaatggatggaacgctaagattgcagagttgacaggtctctcagttgaagaagctatggggaagtctctggtttctgatttaatatacaaagagaatgaagcaactgtcaataagcttctttctcgtgctttgagaggggacgaggaaaagaatgtggaggttaagctgaaaactttcagccccgaactacaagggaaagcagtttttgtggttgtgaatgcttgttccagcaaggactacttgaacaacattgtcggcgtttgttttgttggacaagacgttactagtcagaaaatcgtaatggataagttcatcaacatacaaggagattacaaggctattgtacatagcccaaaccctctaatcccgccaatttttgctgctgacgagaacacgtgctgcctggaatggaacatggcgatggaaaagcttacgggttggtctcgcagtgaagtgattgggaaaatgattgtcggggaagtgtttgggagctgttgcatgctaaagggtcctgatgctttaaccaagttcatgattgtattgcataatgcgattggtggccaagatacggataagttccctttcccattctttgaccgcaatgggaagtttgttcaggctctattgactgcaaacaagcgggttagcctcgagggaaaggttattggggctttctgtttcttgcaaatcccgagccctgagctgcagcaagctttagcagtccaacggaggcaggacacagagtgtttcacgaaggcaaaagagttggcttatatttgtcaggtgataaagaatcctttgagcggtatgcgtttcgcaaactcattgttggaggccacagacttgaacgaggaccagaagcagttacttgaaacaagtgtttcttgcgagaaacagatctcaaggatcgtcggggacatggatcttgaaagcattgaagacggttcatttgtgctaaagagggaagagtttttccttggaagtgtcataaacgcgattgtaagtcaagcgatgttcttattaagggacagaggtcttcagctgatccgtgacattcccgaagagatcaaatcaatagaggtttttggagaccagataaggattcaacagctcctggctgagtttctgctgagtataatccggtatgcaccatctcaagagtgggtggagatccatttaagccaactttcaaagcaaatggctgatggattcgccgccatccgcacagaattcagaatggcgtgtccaggtgaaggtctgcctccagagctagtccgagacatgttccatagcagcaggtggacaagccctgaaggtttaggtctaagcgtatgtcgaaagattttaaagctaatgaacggtgaggttcaatacatccgagaatcagaacggtcctatttcctcatcattctggaactccctgtacctcgaaagcgaccattgtcaactgctagtggaagtggtgacatgatgctgatgatgccatattagatggtttccggagtcgggggtagtggcggtggccgtggcggtggccgtggcggagaagaagaaccgtcgtcaagtcacactcctaataaccgaagaggaggagaacaagctcaatcgtcgggaacgaaatctctcagaccaagaagcaacactgaatcaatgagcaaagcaattcaacagtacaccgtcgacgcaagactccacgccgttttcgaacaatccggcgaatcagggaaatcattcgactactcacaatcactcaaaacgacgacgtacggttcctctgtacctgagcaacagatcacagcttatctctctcgaatccagcgaggtggttacattcagcctttcggatgtatgatcgccgtcgatgaatccagtttccggatcatcggttacagtgaaaacgccagagaaatgttagggattatgcctcaatctgttcctactcttgagaaacctgagattctagctatgggaactgatgtgagatctttgttcacttcttcgagctcgattctactcgagcgtgctttcgttgctcgagagattaccttgttaaatccggtttggatccattccaagaatactggtaaaccgttttacgccattcttcataggattgatgttggtgttgttattgatttagagccagctagaactgaagatcctgcgctttctattgctggtgctgttcaatcgcagaaactcgcggttcgtgcgatttctcagttacaggctcttcctggtggagatattaagcttttgtgtgacactgtcgtggaaagtgtgagggacttgactggttatgatcgtgttatggtttataagtttcatgaagatgagcatggagaagttgtagctgagagtaaacgagatgatttagagccttatattggactgcatgttcctgctactgatattcctcaagcgtcaaggttcttgtttaagcagaaccgtgtccgaatgatagtagattgcaatgccacacctgttcttgtggtccaggacgataggctaactcagtctatgtgcttggttggttctactcttagggctcctcatggttgtcactctcagtatatggctaacatgggatctattgcgtctttagcaatggcggttataatcaatggaaatgaagatgatgggagcaatgtagctagtggaagaagctcgatgaggctttggggtttggttgtttgccatcacacttcttctcgctgcataccgtttccgctaaggtatgcttgtgagtttttgatgcaggctttcggtttacagttaaacatggaattgcagttagctttgcaaatgtcagagaaacgcgttttgagaacgcagacactgttatgtgatatgcttctgcgtgactcgcctgctggaattgttacacagagtcccagtatcatggacttagtgaaatgtgacggtgcagcatttctttaccacgggaagtattacccgttgggtgttgctcctagtgaagttcagataaaagatgttgtggagtggttgcttgcgaatcatgcggattcaaccggattaagcactgatagtttaggcgatgcggggtatcccggtgcagctgcgttaggggatgctgtgtgcggtatggcagttgcatatatcacaaaaagagactttcttttttggtttcgatctcacactgcgaaagaaatcaaatggggaggcgctaagcatcatccggaggataaagatgatgggcaacgaatgcatcctcgttcgtcctttcaggcttttcttgaagttgttaagagccggagtcagccatgggaaactgcggaaatggatgcgattcactcgctccagcttattctgagagactcttttaaagaatctgaggcggctatgaactctaaagttgtggatggtgtggttcagccatgtagggatatggcgggggaacaggggattgatgagttaggtgcagttgcaagagagatggttaggctcattgagactgcaactgttcctatattcgctgtggatgccggaggctgcatcaatggatggaacgctaagattgcagagttgacaggtctctcagttgaagaagctatggggaagtctctggtttctgatttaatatacaaagagaatgaagcaactgtcaataagcttctttctcgtgctttgagaggggacgaggaaaagaatgtggaggttaagctgaaaactttcagccccgaactacaagggaaagcagtttttgtggttgtgaatgcttgttccagcaaggactacttgaacaacattgtcggcgtttgttttgttggacaagacgttactagtcagaaaatcgtaatggataagttcatcaacatacaaggagattacaaggctattgtacatagcccaaaccctctaatcccgccaatttttgctgctgacgagaacacgtgctgcctggaatggaacatggcgatggaaaagcttacgggttggtctcgcagtgaagtgattgggaaaatgattgtcggggaagtgtttgggagctgttgcatgctaaagggtcctgatgctttaaccaagttcatgattgtattgcataatgcgattggtggccaagatacggataagttccctttcccattctttgaccgcaatgggaagtttgttcaggctctattgactgcaaacaagcgggttagcctcgagggaaaggttattggggctttctgtttcttgcaaatcccgagccctgagctgcagcaagctttagcagtccaacggaggcaggacacagagtgtttcacgaaggcaaaagagttggcttatatttgtcaggtgataaagaatcctttgagcggtatgcgtttcgcaaactcattgttggaggccacagacttgaacgaggaccagaagcagttacttgaaacaagtgtttcttgcgagaaacagatctcaaggatcgtcggggacatggatcttgaaagcattgaagacggttcatttgtgctaaagagggaagagtttttccttggaagtgtcataaacgcgattgtaagtcaagcgatgttcttattaagggacagaggtcttcagctgatccgtgacattcccgaagagatcaaatcaatagaggtttttggagaccagataaggattcaacagctcctggctgagtttctgctgagtataatccggtatgcaccatctcaagagtgggtggagatccatttaagccaactttcaaagcaaatggctgatggattcgccgccatccgcacagaattcagaatggcgtgtccaggtgaaggtctgcctccagagctagtccgagacatgttccatagcagcaggtggacaagccctgaaggtttaggtctaagcgtatgtcgaaagattttaaagctaatgaacggtgaggttcaatacatccgagaatcagaacggtcctatttcctcatcattctggaactccctgtacctcgaaagcgaccattgtcaactgctagtggaagtggtgacatgatgctgatgatgccatattagatggtttccggagtcgggggtagtggcggtggccgtggcggtggccgtggcggagaagaagaaccgtcgtcaagtcacactcctaataaccgaagaggaggagaacaagctcaatcgtcgggaacgaaatctctcagaccaagaagcaacactgaatcaatgagcaaagcaattcaacagtacaccgtcgacgcaagactccacgccgttttcgaacaatccggcgaatcagggaaatcattcgactactcacaatcactcaaaacgacgacgtacggttcctctgtacctgagcaacagatcacagcttatctctctcgaatccagcgaggtggttacattcagcctttcggatgtatgatcgccgtcgatgaatccagtttccggatcatcggttacagtgaaaacgccagagaaatgttagggattatgcctcaatctgttcctactcttgagaaacctgagattctagctatgggaactgatgtgagatctttgttcacttcttcgagctcgattctactcgagcgtgctttcgttgctcgagagattaccttgttaaatccggtttggatccattccaagaatactggtaaaccgttttacgccattcttcataggattgatgttggtgttgttattgatttagagccagctagaactgaagatcctgcgctttctattgctggtgctgttcaatcgcagaaactcgcggttcgtgcgatttctcagttacaggctcttcctggtggagatattaagcttttgtgtgacactgtcgtggaaagtgtgagggacttgactggttatgatcgtgttatggtttataagtttcatgaagatgagcatggagaagttgtagctgagagtaaacgagatgatttagagccttatattggactgcatgttcctgctactgatattcctcaagcgtcaaggttcttgtttaagcagaaccgtgtccgaatgatagtagattgcaatgccacacctgttcttgtggtccaggacgataggctaactcagtctatgtgcttggttggttctactcttagggctcctcatggttgtcactctcagtatatggctaacatgggatctattgcgtctttagcaatggcggttataatcaatggaaatgaagatgatgggagcaatgtagctagtggaagaagctcgatgaggctttggggtttggttgtttgccatcacacttcttctcgctgcataccgtttccgctaaggtatgcttgtgagtttttgatgcaggctttcggtttacagttaaacatggaattgcagttagctttgcaaatgtcagagaaacgcgttttgagaacgcagacactgttatgtgatatgcttctgcgtgactcgcctgctggaattgttacacagagtcccagtatcatggacttagtgaaatgtgacggtgcagcatttctttaccacgggaagtattacccgttgggtgttgctcctagtgaagttcagataaaagatgttgtggagtggttgcttgcgaatcatgcggattcaaccggattaagcactgatagtttaggcgatgcggggtatcccggtgcagctgcgttaggggatgctgtgtgcggtatggcagttgcatatatcacaaaaagagactttcttttttggtttcgatctcacactgcgaaagaaatcaaatggggaggcgctaagcatcatccggaggataaagatgatgggcaacgaatgcatcctcgttcgtcctttcaggcttttcttgaagttgttaagagccggagtcagccatgggaaactgcggaaatggatgcgattcactcgctccagcttattctgagagactcttttaaagaatctgaggcggctatgaactctaaagttgtggatggtgtggttcagccatgtagggatatggcgggggaacaggggattgatgagttaggtgcagttgcaagagagatggttaggctcattgagactgcaactgttcctatattcgctgtggatgccggaggctgcatcaatggatggaacgctaagattgcagagttgacaggtctctcagttgaagaagctatggggaagtctctggtttctgatttaatatacaaagagaatgaagcaactgtcaataagcttctttctcgtgctttgagaggggacgaggaaaagaatgtggaggttaagctgaaaactttcagccccgaactacaagggaaagcagtttttgtggttgtgaatgcttgttccagcaaggactacttgaacaacattgtcggcgtttgttttgttggacaagacgttactagtcagaaaatcgtaatggataagttcatcaacatacaaggagattacaaggctattgtacatagcccaaaccctctaatcccgccaatttttgctgctgacgagaacacgtgctgcctggaatggaacatggcgatggaaaagcttacgggttggtctcgcagtgaagtgattgggaaaatgattgtcggggaagtgtttgggagctgttgcatgctaaagggtcctgatgctttaaccaagttcatgattgtattgcataatgcgattggtggccaagatacggataagttccctttcccattctttgaccgcaatgggaagtttgttcaggctctattgactgcaaacaagcgggttagcctcgagggaaaggttattggggctttctgtttcttgcaaatcccgagccctgagctgcagcaagctttagcagtccaacggaggcaggacacagagtgtttcacgaaggcaaaagagttggcttatatttgtcaggtgataaagaatcctttgagcggtatgcgtttcgcaaactcattgttggaggccacagacttgaacgaggaccagaagcagttacttgaaacaagtgtttcttgcgagaaacagatctcaaggatcgtcggggacatggatcttgaaagcattgaagacggttcatttgtgctaaagagggaagagtttttccttggaagtgtcataaacgcgattgtaagtcaagcgatgttcttattaagggacagaggtcttcagctgatccgtgacattcccgaagagatcaaatcaatagaggtttttggagaccagataaggattcaacagctcctggctgagtttctgctgagtataatccggtatgcaccatctcaagagtgggtggagatccatttaagccaactttcaaagcaaatggctgatggattcgccgccatccgcacagaattcagaatggcgtgtccaggtgaaggtctgcctccagagctagtccgagacatgttccatagcagcaggtggacaagccctgaaggtttaggtctaagcgtatgtcgaaagattttaaagctaatgaacggtgaggttcaatacatccgagaatcagaacggtcctatttcctcatcattctggaactccctgtacctcgaaagcgaccattgtcaactgctagtggaagtggtgacatgatgctgatgatgccatattagatggtttccggagtcgggggtagtggcggtggccgtggcggtggccgtggcggagaagaagaaccgtcgtcaagtcacactcctaataaccgaagaggaggagaacaagctcaatcgtcgggaacgaaatctctcagaccaagaagcaacactgaatcaatgagcaaagcaattcaacagtacaccgtcgacgcaagactccacgccgttttcgaacaatccggcgaatcagggaaatcattcgactactcacaatcactcaaaacgacgacgtacggttcctctgtacctgagcaacagatcacagcttatctctctcgaatccagcgaggtggttacattcagcctttcggatgtatgatcgccgtcgatgaatccagtttccggatcatcggttacagtgaaaacgccagagaaatgttagggattatgcctcaatctgttcctactcttgagaaacctgagattctagctatgggaactgatgtgagatctttgttcacttcttcgagctcgattctactcgagcgtgctttcgttgctcgagagattaccttgttaaatccggtttggatccattccaagaatactggtaaaccgttttacgccattcttcataggattgatgttggtgttgttattgatttagagccagctagaactgaagatcctgcgctttctattgctggtgctgttcaatcgcagaaactcgcggttcgtgcgatttctcagttacaggctcttcctggtggagatattaagcttttgtgtgacactgtcgtggaaagtgtgagggacttgactggttatgatcgtgttatggtttataagtttcatgaagatgagcatggagaagttgtagctgagagtaaacgagatgatttagagccttatattggactgcatgttcctgctactgatattcctcaagcgtcaaggttcttgtttaagcagaaccgtgtccgaatgatagtagattgcaatgccacacctgttcttgtggtccaggacgataggctaactcagtctatgtgcttggttggttctactcttagggctcctcatggttgtcactctcagtatatggctaacatgggatctattgcgtctttagcaatggcggttataatcaatggaaatgaagatgatgggagcaatgtagctagtggaagaagctcgatgaggctttggggtttggttgtttgccatcacacttcttctcgctgcataccgtttccgctaaggtatgcttgtgagtttttgatgcaggctttcggtttacagttaaacatggaattgcagttagctttgcaaatgtcagagaaacgcgttttgagaacgcagacactgttatgtgatatgcttctgcgtgactcgcctgctggaattgttacacagagtcccagtatcatggacttagtgaaatgtgacggtgcagcatttctttaccacgggaagtattacccgttgggtgttgctcctagtgaagttcagataaaagatgttgtggagtggttgcttgcgaatcatgcggattcaaccggattaagcactgatagtttaggcgatgcggggtatcccggtgcagctgcgttaggggatgctgtgtgcggtatggcagttgcatatatcacaaaaagagactttcttttttggtttcgatctcacactgcgaaagaaatcaaatggggaggcgctaagcatcatccggaggataaagatgatgggcaacgaatgcatcctcgttcgtcctttcaggcttttcttgaagttgttaagagccggagtcagccatgggaaactgcggaaatggatgcgattcactcgctccagcttattctgagagactcttttaaagaatctgaggcggctatgaactctaaagttgtggatggtgtggttcagccatgtagggatatggcgggggaacaggggattgatgagttaggtgcagttgcaagagagatggttaggctcattgagactgcaactgttcctatattcgctgtggatgccggaggctgcatcaatggatggaacgctaagattgcagagttgacaggtctctcagttgaagaagctatggggaagtctctggtttctgatttaatatacaaagagaatgaagcaactgtcaataagcttctttctcgtgctttgagaggggacgaggaaaagaatgtggaggttaagctgaaaactttcagccccgaactacaagggaaagcagtttttgtggttgtgaatgcttgttccagcaaggactacttgaacaacattgtcggcgtttgttttgttggacaagacgttactagtcagaaaatcgtaatggataagttcatcaacatacaaggagattacaaggctattgtacatagcccaaaccctctaatcccgccaatttttgctgctgacgagaacacgtgctgcctggaatggaacatggcgatggaaaagcttacgggttggtctcgcagtgaagtgattgggaaaatgattgtcggggaagtgtttgggagctgttgcatgctaaagggtcctgatgctttaaccaagttcatgattgtattgcataatgcgattggtggccaagatacggataagttccctttcccattctttgaccgcaatgggaagtttgttcaggctctattgactgcaaacaagcgggttagcctcgagggaaaggttattggggctttctgtttcttgcaaatcccgagccctgagctgcagcaagctttagcagtccaacggaggcaggacacagagtgtttcacgaaggcaaaagagttggcttatatttgtcaggtgataaagaatcctttgagcggtatgcgtttcgcaaactcattgttggaggccacagacttgaacgaggaccagaagcagttacttgaaacaagtgtttcttgcgagaaacagatctcaaggatcgtcggggacatggatcttgaaagcattgaagacggttcatttgtgctaaagagggaagagtttttccttggaagtgtcataaacgcgattgtaagtcaagcgatgttcttattaagggacagaggtcttcagctgatccgtgacattcccgaagagatcaaatcaatagaggtttttggagaccagataaggattcaacagctcctggctgagtttctgctgagtataatccggtatgcaccatctcaagagtgggtggagatccatttaagccaactttcaaagcaaatggctgatggattcgccgccatccgcacagaattcagaatggcgtgtccaggtgaaggtctgcctccagagctagtccgagacatgttccatagcagcaggtggacaagccctgaaggtttaggtctaagcgtatgtcgaaagattttaaagctaatgaacggtgaggttcaatacatccgagaatcagaacggtcctatttcctcatcattctggaactccctgtacctcgaaagcgaccattgtcaactgctagtggaagtggtgacatgatgctgatgatgccatattagatggtttccggagtcgggggtagtggcggtggccgtggcggtggccgtggcggagaagaagaaccgtcgtcaagtcacactcctaataaccgaagaggaggagaacaagctcaatcgtcgggaacgaaatctctcagaccaagaagcaacactgaatcaatgagcaaagcaattcaacagtacaccgtcgacgcaagactccacgccgttttcgaacaatccggcgaatcagggaaatcattcgactactcacaatcactcaaaacgacgacgtacggttcctctgtacctgagcaacagatcacagcttatctctctcgaatccagcgaggtggttacattcagcctttcggatgtatgatcgccgtcgatgaatccagtttccggatcatcggttacagtgaaaacgccagagaaatgttagggattatgcctcaatctgttcctactcttgagaaacctgagattctagctatgggaactgatgtgagatctttgttcacttcttcgagctcgattctactcgagcgtgctttcgttgctcgagagattaccttgttaaatccggtttggatccattccaagaatactggtaaaccgttttacgccattcttcataggattgatgttggtgttgttattgatttagagccagctagaactgaagatcctgcgctttctattgctggtgctgttcaatcgcagaaactcgcggttcgtgcgatttctcagttacaggctcttcctggtggagatattaagcttttgtgtgacactgtcgtggaaagtgtgagggacttgactggttatgatcgtgttatggtttataagtttcatgaagatgagcatggagaagttgtagctgagagtaaacgagatgatttagagccttatattggactgcatgttcctgctactgatattcctcaagcgtcaaggttcttgtttaagcagaaccgtgtccgaatgatagtagattgcaatgccacacctgttcttgtggtccaggacgataggctaactcagtctatgtgcttggttggttctactcttagggctcctcatggttgtcactctcagtatatggctaacatgggatctattgcgtctttagcaatggcggttataatcaatggaaatgaagatgatgggagcaatgtagctagtggaagaagctcgatgaggctttggggtttggttgtttgccatcacacttcttctcgctgcataccgtttccgctaaggtatgcttgtgagtttttgatgcaggctttcggtttacagttaaacatggaattgcagttagctttgcaaatgtcagagaaacgcgttttgagaacgcagacactgttatgtgatatgcttctgcgtgactcgcctgctggaattgttacacagagtcccagtatcatggacttagtgaaatgtgacggtgcagcatttctttaccacgggaagtattacccgttgggtgttgctcctagtgaagttcagataaaagatgttgtggagtggttgcttgcgaatcatgcggattcaaccggattaagcactgatagtttaggcgatgcggggtatcccggtgcagctgcgttaggggatgctgtgtgcggtatggcagttgcatatatcacaaaaagagactttcttttttggtttcgatctcacactgcgaaagaaatcaaatggggaggcgctaagcatcatccggaggataaagatgatgggcaacgaatgcatcctcgttcgtcctttcaggcttttcttgaagttgttaagagccggagtcagccatgggaaactgcggaaatggatgcgattcactcgctccagcttattctgagagactcttttaaagaatctgaggcggctatgaactctaaagttgtggatggtgtggttcagccatgtagggatatggcgggggaacaggggattgatgagttaggtgcagttgcaagagagatggttaggctcattgagactgcaactgttcctatattcgctgtggatgccggaggctgcatcaatggatggaacgctaagattgcagagttgacaggtctctcagttgaagaagctatggggaagtctctggtttctgatttaatatacaaagagaatgaagcaactgtcaataagcttctttctcgtgctttgagaggggacgaggaaaagaatgtggaggttaagctgaaaactttcagccccgaactacaagggaaagcagtttttgtggttgtgaatgcttgttccagcaaggactacttgaacaacattgtcggcgtttgttttgttggacaagacgttactagtcagaaaatcgtaatggataagttcatcaacatacaaggagattacaaggctattgtacatagcccaaaccctctaatcccgccaatttttgctgctgacgagaacacgtgctgcctggaatggaacatggcgatggaaaagcttacgggttggtctcgcagtgaagtgattgggaaaatgattgtcggggaagtgtttgggagctgttgcatgctaaagggtcctgatgctttaaccaagttcatgattgtattgcataatgcgattggtggccaagatacggataagttccctttcccattctttgaccgcaatgggaagtttgttcaggctctattgactgcaaacaagcgggttagcctcgagggaaaggttattggggctttctgtttcttgcaaatcccgagccctgagctgcagcaagctttagcagtccaacggaggcaggacacagagtgtttcacgaaggcaaaagagttggcttatatttgtcaggtgataaagaatcctttgagcggtatgcgtttcgcaaactcattgttggaggccacagacttgaacgaggaccagaagcagttacttgaaacaagtgtttcttgcgagaaacagatctcaaggatcgtcggggacatggatcttgaaagcattgaagacggttcatttgtgctaaagagggaagagtttttccttggaagtgtcataaacgcgattgtaagtcaagcgatgttcttattaagggacagaggtcttcagctgatccgtgacattcccgaagagatcaaatcaatagaggtttttggagaccagataaggattcaacagctcctggctgagtttctgctgagtataatccggtatgcaccatctcaagagtgggtggagatccatttaagccaactttcaaagcaaatggctgatggattcgccgccatccgcacagaattcagaatggcgtgtccaggtgaaggtctgcctccagagctagtccgagacatgttccatagcagcaggtggacaagccctgaaggtttaggtctaagcgtatgtcgaaagattttaaagctaatgaacggtgaggttcaatacatccgagaatcagaacggtcctatttcctcatcattctggaactccctgtacctcgaaagcgaccattgtcaactgctagtggaagtggtgacatgatgctgatgatgccatattagatggtttccggagtcgggggtagtggcggtggccgtggcggtggccgtggcggagaagaagaaccgtcgtcaagtcacactcctaataaccgaagaggaggagaacaagctcaatcgtcgggaacgaaatctctcagaccaagaagcaacactgaatcaatgagcaaagcaattcaacagtacaccgtcgacgcaagactccacgccgttttcgaacaatccggcgaatcagggaaatcattcgactactcacaatcactcaaaacgacgacgtacggttcctctgtacctgagcaacagatcacagcttatctctctcgaatccagcgaggtggttacattcagcctttcggatgtatgatcgccgtcgatgaatccagtttccggatcatcggttacagtgaaaacgccagagaaatgttagggattatgcctcaatctgttcctactcttgagaaacctgagattctagctatgggaactgatgtgagatctttgttcacttcttcgagctcgattctactcgagcgtgctttcgttgctcgagagattaccttgttaaatccggtttggatccattccaagaatactggtaaaccgttttacgccattcttcataggattgatgttggtgttgttattgatttagagccagctagaactgaagatcctgcgctttctattgctggtgctgttcaatcgcagaaactcgcggttcgtgcgatttctcagttacaggctcttcctggtggagatattaagcttttgtgtgacactgtcgtggaaagtgtgagggacttgactggttatgatcgtgttatggtttataagtttcatgaagatgagcatggagaagttgtagctgagagtaaacgagatgatttagagccttatattggactgcatgttcctgctactgatattcctcaagcgtcaaggttcttgtttaagcagaaccgtgtccgaatgatagtagattgcaatgccacacctgttcttgtggtccaggacgataggctaactcagtctatgtgcttggttggttctactcttagggctcctcatggttgtcactctcagtatatggctaacatgggatctattgcgtctttagcaatggcggttataatcaatggaaatgaagatgatgggagcaatgtagctagtggaagaagctcgatgaggctttggggtttggttgtttgccatcacacttcttctcgctgcataccgtttccgctaaggtatgcttgtgagtttttgatgcaggctttcggtttacagttaaacatggaattgcagttagctttgcaaatgtcagagaaacgcgttttgagaacgcagacactgttatgtgatatgcttctgcgtgactcgcctgctggaattgttacacagagtcccagtatcatggacttagtgaaatgtgacggtgcagcatttctttaccacgggaagtattacccgttgggtgttgctcctagtgaagttcagataaaagatgttgtggagtggttgcttgcgaatcatgcggattcaaccggattaagcactgatagtttaggcgatgcggggtatcccggtgcagctgcgttaggggatgctgtgtgcggtatggcagttgcatatatcacaaaaagagactttcttttttggtttcgatctcacactgcgaaagaaatcaaatggggaggcgctaagcatcatccggaggataaagatgatgggcaacgaatgcatcctcgttcgtcctttcaggcttttcttgaagttgttaagagccggagtcagccatgggaaactgcggaaatggatgcgattcactcgctccagcttattctgagagactcttttaaagaatctgaggcggctatgaactctaaagttgtggatggtgtggttcagccatgtagggatatggcgggggaacaggggattgatgagttaggtgcagttgcaagagagatggttaggctcattgagactgcaactgttcctatattcgctgtggatgccggaggctgcatcaatggatggaacgctaagattgcagagttgacaggtctctcagttgaagaagctatggggaagtctctggtttctgatttaatatacaaagagaatgaagcaactgtcaataagcttctttctcgtgctttgagaggggacgaggaaaagaatgtggaggttaagctgaaaactttcagccccgaactacaagggaaagcagtttttgtggttgtgaatgcttgttccagcaaggactacttgaacaacattgtcggcgtttgttttgttggacaagacgttactagtcagaaaatcgtaatggataagttcatcaacatacaaggagattacaaggctattgtacatagcccaaaccctctaatcccgccaatttttgctgctgacgagaacacgtgctgcctggaatggaacatggcgatggaaaagcttacgggttggtctcgcagtgaagtgattgggaaaatgattgtcggggaagtgtttgggagctgttgcatgctaaagggtcctgatgctttaaccaagttcatgattgtattgcataatgcgattggtggccaagatacggataagttccctttcccattctttgaccgcaatgggaagtttgttcaggctctattgactgcaaacaagcgggttagcctcgagggaaaggttattggggctttctgtttcttgcaaatcccgagccctgagctgcagcaagctttagcagtccaacggaggcaggacacagagtgtttcacgaaggcaaaagagttggcttatatttgtcaggtgataaagaatcctttgagcggtatgcgtttcgcaaactcattgttggaggccacagacttgaacgaggaccagaagcagttacttgaaacaagtgtttcttgcgagaaacagatctcaaggatcgtcggggacatggatcttgaaagcattgaagacggttcatttgtgctaaagagggaagagtttttccttggaagtgtcataaacgcgattgtaagtcaagcgatgttcttattaagggacagaggtcttcagctgatccgtgacattcccgaagagatcaaatcaatagaggtttttggagaccagataaggattcaacagctcctggctgagtttctgctgagtataatccggtatgcaccatctcaagagtgggtggagatccatttaagccaactttcaaagcaaatggctgatggattcgccgccatccgcacagaattcagaatggcgtgtccaggtgaaggtctgcctccagagctagtccgagacatgttccatagcagcaggtggacaagccctgaaggtttaggtctaagcgtatgtcgaaagattttaaagctaatgaacggtgaggttcaatacatccgagaatcagaacggtcctatttcctcatcattctggaactccctgtacctcgaaagcgaccattgtcaactgctagtggaagtggtgacatgatgctgatgatgccatattagatggtttccggagtcgggggtagtggcggtggccgtggcggtggccgtggcggagaagaagaaccgtcgtcaagtcacactcctaataaccgaagaggaggagaacaagctcaatcgtcgggaacgaaatctctcagaccaagaagcaacactgaatcaatgagcaaagcaattcaacagtacaccgtcgacgcaagactccacgccgttttcgaacaatccggcgaatcagggaaatcattcgactactcacaatcactcaaaacgacgacgtacggttcctctgtacctgagcaacagatcacagcttatctctctcgaatccagcgaggtggttacattcagcctttcggatgtatgatcgccgtcgatgaatccagtttccggatcatcggttacagtgaaaacgccagagaaatgttagggattatgcctcaatctgttcctactcttgagaaacctgagattctagctatgggaactgatgtgagatctttgttcacttcttcgagctcgattctactcgagcgtgctttcgttgctcgagagattaccttgttaaatccggtttggatccattccaagaatactggtaaaccgttttacgccattcttcataggattgatgttggtgttgttattgatttagagccagctagaactgaagatcctgcgctttctattgctggtgctgttcaatcgcagaaactcgcggttcgtgcgatttctcagttacaggctcttcctggtggagatattaagcttttgtgtgacactgtcgtggaaagtgtgagggacttgactggttatgatcgtgttatggtttataagtttcatgaagatgagcatggagaagttgtagctgagagtaaacgagatgatttagagccttatattggactgcatgttcctgctactgatattcctcaagcgtcaaggttcttgtttaagcagaaccgtgtccgaatgatagtagattgcaatgccacacctgttcttgtggtccaggacgataggctaactcagtctatgtgcttggttggttctactcttagggctcctcatggttgtcactctcagtatatggctaacatgggatctattgcgtctttagcaatggcggttataatcaatggaaatgaagatgatgggagcaatgtagctagtggaagaagctcgatgaggctttggggtttggttgtttgccatcacacttcttctcgctgcataccgtttccgctaaggtatgcttgtgagtttttgatgcaggctttcggtttacagttaaacatggaattgcagttagctttgcaaatgtcagagaaacgcgttttgagaacgcagacactgttatgtgatatgcttctgcgtgactcgcctgctggaattgttacacagagtcccagtatcatggacttagtgaaatgtgacggtgcagcatttctttaccacgggaagtattacccgttgggtgttgctcctagtgaagttcagataaaagatgttgtggagtggttgcttgcgaatcatgcggattcaaccggattaagcactgatagtttaggcgatgcggggtatcccggtgcagctgcgttaggggatgctgtgtgcggtatggcagttgcatatatcacaaaaagagactttcttttttggtttcgatctcacactgcgaaagaaatcaaatggggaggcgctaagcatcatccggaggataaagatgatgggcaacgaatgcatcctcgttcgtcctttcaggcttttcttgaagttgttaagagccggagtcagccatgggaaactgcggaaatggatgcgattcactcgctccagcttattctgagagactcttttaaagaatctgaggcggctatgaactctaaagttgtggatggtgtggttcagccatgtagggatatggcgggggaacaggggattgatgagttaggtgcagttgcaagagagatggttaggctcattgagactgcaactgttcctatattcgctgtggatgccggaggctgcatcaatggatggaacgctaagattgcagagttgacaggtctctcagttgaagaagctatggggaagtctctggtttctgatttaatatacaaagagaatgaagcaactgtcaataagcttctttctcgtgctttgagaggggacgaggaaaagaatgtggaggttaagctgaaaactttcagccccgaactacaagggaaagcagtttttgtggttgtgaatgcttgttccagcaaggactacttgaacaacattgtcggcgtttgttttgttggacaagacgttactagtcagaaaatcgtaatggataagttcatcaacatacaaggagattacaaggctattgtacatagcccaaaccctctaatcccgccaatttttgctgctgacgagaacacgtgctgcctggaatggaacatggcgatggaaaagcttacgggttggtctcgcagtgaagtgattgggaaaatgattgtcggggaagtgtttgggagctgttgcatgctaaagggtcctgatgctttaaccaagttcatgattgtattgcataatgcgattggtggccaagatacggataagttccctttcccattctttgaccgcaatgggaagtttgttcaggctctattgactgcaaacaagcgggttagcctcgagggaaaggttattggggctttctgtttcttgcaaatcccgagccctgagctgcagcaagctttagcagtccaacggaggcaggacacagagtgtttcacgaaggcaaaagagttggcttatatttgtcaggtgataaagaatcctttgagcggtatgcgtttcgcaaactcattgttggaggccacagacttgaacgaggaccagaagcagttacttgaaacaagtgtttcttgcgagaaacagatctcaaggatcgtcggggacatggatcttgaaagcattgaagacggttcatttgtgctaaagagggaagagtttttccttggaagtgtcataaacgcgattgtaagtcaagcgatgttcttattaagggacagaggtcttcagctgatccgtgacattcccgaagagatcaaatcaatagaggtttttggagaccagataaggattcaacagctcctggctgagtttctgctgagtataatccggtatgcaccatctcaagagtgggtggagatccatttaagccaactttcaaagcaaatggctgatggattcgccgccatccgcacagaattcagaatggcgtgtccaggtgaaggtctgcctccagagctagtccgagacatgttccatagcagcaggtggacaagccctgaaggtttaggtctaagcgtatgtcgaaagattttaaagctaatgaacggtgaggttcaatacatccgagaatcagaacggtcctatttcctcatcattctggaactccctgtacctcgaaagcgaccattgtcaactgctagtggaagtggtgacatgatgctgatgatgccatattagatggtttccggagtcgggggtagtggcggtggccgtggcggtggccgtggcggagaagaagaaccgtcgtcaagtcacactcctaataaccgaagaggaggagaacaagctcaatcgtcgggaacgaaatctctcagaccaagaagcaacactgaatcaatgagcaaagcaattcaacagtacaccgtcgacgcaagactccacgccgttttcgaacaatccggcgaatcagggaaatcattcgactactcacaatcactcaaaacgacgacgtacggttcctctgtacctgagcaacagatcacagcttatctctctcgaatccagcgaggtggttacattcagcctttcggatgtatgatcgccgtcgatgaatccagtttccggatcatcggttacagtgaaaacgccagagaaatgttagggattatgcctcaatctgttcctactcttgagaaacctgagattctagctatgggaactgatgtgagatctttgttcacttcttcgagctcgattctactcgagcgtgctttcgttgctcgagagattaccttgttaaatccggtttggatccattccaagaatactggtaaaccgttttacgccattcttcataggattgatgttggtgttgttattgatttagagccagctagaactgaagatcctgcgctttctattgctggtgctgttcaatcgcagaaactcgcggttcgtgcgatttctcagttacaggctcttcctggtggagatattaagcttttgtgtgacactgtcgtggaaagtgtgagggacttgactggttatgatcgtgttatggtttataagtttcatgaagatgagcatggagaagttgtagctgagagtaaacgagatgatttagagccttatattggactgcatgttcctgctactgatattcctcaagcgtcaaggttcttgtttaagcagaaccgtgtccgaatgatagtagattgcaatgccacacctgttcttgtggtccaggacgataggctaactcagtctatgtgcttggttggttctactcttagggctcctcatggttgtcactctcagtatatggctaacatgggatctattgcgtctttagcaatggcggttataatcaatggaaatgaagatgatgggagcaatgtagctagtggaagaagctcgatgaggctttggggtttggttgtttgccatcacacttcttctcgctgcataccgtttccgctaaggtatgcttgtgagtttttgatgcaggctttcggtttacagttaaacatggaattgcagttagctttgcaaatgtcagagaaacgcgttttgagaacgcagacactgttatgtgatatgcttctgcgtgactcgcctgctggaattgttacacagagtcccagtatcatggacttagtgaaatgtgacggtgcagcatttctttaccacgggaagtattacccgttgggtgttgctcctagtgaagttcagataaaagatgttgtggagtggttgcttgcgaatcatgcggattcaaccggattaagcactgatagtttaggcgatgcggggtatcccggtgcagctgcgttaggggatgctgtgtgcggtatggcagttgcatatatcacaaaaagagactttcttttttggtttcgatctcacactgcgaaagaaatcaaatggggaggcgctaagcatcatccggaggataaagatgatgggcaacgaatgcatcctcgttcgtcctttcaggcttttcttgaagttgttaagagccggagtcagccatgggaaactgcggaaatggatgcgattcactcgctccagcttattctgagagactcttttaaagaatctgaggcggctatgaactctaaagttgtggatggtgtggttcagccatgtagggatatggcgggggaacaggggattgatgagttaggtgcagttgcaagagagatggttaggctcattgagactgcaactgttcctatattcgctgtggatgccggaggctgcatcaatggatggaacgctaagattgcagagttgacaggtctctcagttgaagaagctatggggaagtctctggtttctgatttaatatacaaagagaatgaagcaactgtcaataagcttctttctcgtgctttgagaggggacgaggaaaagaatgtggaggttaagctgaaaactttcagccccgaactacaagggaaagcagtttttgtggttgtgaatgcttgttccagcaaggactacttgaacaacattgtcggcgtttgttttgttggacaagacgttactagtcagaaaatcgtaatggataagttcatcaacatacaaggagattacaaggctattgtacatagcccaaaccctctaatcccgccaatttttgctgctgacgagaacacgtgctgcctggaatggaacatggcgatggaaaagcttacgggttggtctcgcagtgaagtgattgggaaaatgattgtcggggaagtgtttgggagctgttgcatgctaaagggtcctgatgctttaaccaagttcatgattgtattgcataatgcgattggtggccaagatacggataagttccctttcccattctttgaccgcaatgggaagtttgttcaggctctattgactgcaaacaagcgggttagcctcgagggaaaggttattggggctttctgtttcttgcaaatcccgagccctgagctgcagcaagctttagcagtccaacggaggcaggacacagagtgtttcacgaaggcaaaagagttggcttatatttgtcaggtgataaagaatcctttgagcggtatgcgtttcgcaaactcattgttggaggccacagacttgaacgaggaccagaagcagttacttgaaacaagtgtttcttgcgagaaacagatctcaaggatcgtcggggacatggatcttgaaagcattgaagacggttcatttgtgctaaagagggaagagtttttccttggaagtgtcataaacgcgattgtaagtcaagcgatgttcttattaagggacagaggtcttcagctgatccgtgacattcccgaagagatcaaatcaatagaggtttttggagaccagataaggattcaacagctcctggctgagtttctgctgagtataatccggtatgcaccatctcaagagtgggtggagatccatttaagccaactttcaaagcaaatggctgatggattcgccgccatccgcacagaattcagaatggcgtgtccaggtgaaggtctgcctccagagctagtccgagacatgttccatagcagcaggtggacaagccctgaaggtttaggtctaagcgtatgtcgaaagattttaaagctaatgaacggtgaggttcaatacatccgagaatcagaacggtcctatttcctcatcattctggaactccctgtacctcgaaagcgaccattgtcaactgctagtggaagtggtgacatgatgctgatgatgccatattagatggtttccggagtcgggggtagtggcggtggccgtggcggtggccgtggcggagaagaagaaccgtcgtcaagtcacactcctaataaccgaagaggaggagaacaagctcaatcgtcgggaacgaaatctctcagaccaagaagcaacactgaatcaatgagcaaagcaattcaacagtacaccgtcgacgcaagactccacgccgttttcgaacaatccggcgaatcagggaaatcattcgactactcacaatcactcaaaacgacgacgtacggttcctctgtacctgagcaacagatcacagcttatctctctcgaatccagcgaggtggttacattcagcctttcggatgtatgatcgccgtcgatgaatccagtttccggatcatcggttacagtgaaaacgccagagaaatgttagggattatgcctcaatctgttcctactcttgagaaacctgagattctagctatgggaactgatgtgagatctttgttcacttcttcgagctcgattctactcgagcgtgctttcgttgctcgagagattaccttgttaaatccggtttggatccattccaagaatactggtaaaccgttttacgccattcttcataggattgatgttggtgttgttattgatttagagccagctagaactgaagatcctgcgctttctattgctggtgctgttcaatcgcagaaactcgcggttcgtgcgatttctcagttacaggctcttcctggtggagatattaagcttttgtgtgacactgtcgtggaaagtgtgagggacttgactggttatgatcgtgttatggtttataagtttcatgaagatgagcatggagaagttgtagctgagagtaaacgagatgatttagagccttatattggactgcatgttcctgctactgatattcctcaagcgtcaaggttcttgtttaagcagaaccgtgtccgaatgatagtagattgcaatgccacacctgttcttgtggtccaggacgataggctaactcagtctatgtgcttggttggttctactcttagggctcctcatggttgtcactctcagtatatggctaacatgggatctattgcgtctttagcaatggcggttataatcaatggaaatgaagatgatgggagcaatgtagctagtggaagaagctcgatgaggctttggggtttggttgtttgccatcacacttcttctcgctgcataccgtttccgctaaggtatgcttgtgagtttttgatgcaggctttcggtttacagttaaacatggaattgcagttagctttgcaaatgtcagagaaacgcgttttgagaacgcagacactgttatgtgatatgcttctgcgtgactcgcctgctggaattgttacacagagtcccagtatcatggacttagtgaaatgtgacggtgcagcatttctttaccacgggaagtattacccgttgggtgttgctcctagtgaagttcagataaaagatgttgtggagtggttgcttgcgaatcatgcggattcaaccggattaagcactgatagtttaggcgatgcggggtatcccggtgcagctgcgttaggggatgctgtgtgcggtatggcagttgcatatatcacaaaaagagactttcttttttggtttcgatctcacactgcgaaagaaatcaaatggggaggcgctaagcatcatccggaggataaagatgatgggcaacgaatgcatcctcgttcgtcctttcaggcttttcttgaagttgttaagagccggagtcagccatgggaaactgcggaaatggatgcgattcactcgctccagcttattctgagagactcttttaaagaatctgaggcggctatgaactctaaagttgtggatggtgtggttcagccatgtagggatatggcgggggaacaggggattgatgagttaggtgcagttgcaagagagatggttaggctcattgagactgcaactgttcctatattcgctgtggatgccggaggctgcatcaatggatggaacgctaagattgcagagttgacaggtctctcagttgaagaagctatggggaagtctctggtttctgatttaatatacaaagagaatgaagcaactgtcaataagcttctttctcgtgctttgagaggggacgaggaaaagaatgtggaggttaagctgaaaactttcagccccgaactacaagggaaagcagtttttgtggttgtgaatgcttgttccagcaaggactacttgaacaacattgtcggcgtttgttttgttggacaagacgttactagtcagaaaatcgtaatggataagttcatcaacatacaaggagattacaaggctattgtacatagcccaaaccctctaatcccgccaatttttgctgctgacgagaacacgtgctgcctggaatggaacatggcgatggaaaagcttacgggttggtctcgcagtgaagtgattgggaaaatgattgtcggggaagtgtttgggagctgttgcatgctaaagggtcctgatgctttaaccaagttcatgattgtattgcataatgcgattggtggccaagatacggataagttccctttcccattctttgaccgcaatgggaagtttgttcaggctctattgactgcaaacaagcgggttagcctcgagggaaaggttattggggctttctgtttcttgcaaatcccgagccctgagctgcagcaagctttagcagtccaacggaggcaggacacagagtgtttcacgaaggcaaaagagttggcttatatttgtcaggtgataaagaatcctttgagcggtatgcgtttcgcaaactcattgttggaggccacagacttgaacgaggaccagaagcagttacttgaaacaagtgtttcttgcgagaaacagatctcaaggatcgtcggggacatggatcttgaaagcattgaagacggttcatttgtgctaaagagggaagagtttttccttggaagtgtcataaacgcgattgtaagtcaagcgatgttcttattaagggacagaggtcttcagctgatccgtgacattcccgaagagatcaaatcaatagaggtttttggagaccagataaggattcaacagctcctggctgagtttctgctgagtataatccggtatgcaccatctcaagagtgggtggagatccatttaagccaactttcaaagcaaatggctgatggattcgccgccatccgcacagaattcagaatggcgtgtccaggtgaaggtctgcctccagagctagtccgagacatgttccatagcagcaggtggacaagccctgaaggtttaggtctaagcgtatgtcgaaagattttaaagctaatgaacggtgaggttcaatacatccgagaatcagaacggtcctatttcctcatcattctggaactccctgtacctcgaaagcgaccattgtcaactgctagtggaagtggtgacatgatgctgatgatgccatattagatggtttccggagtcgggggtagtggcggtggccgtggcggtggccgtggcggagaagaagaaccgtcgtcaagtcacactcctaataaccgaagaggaggagaacaagctcaatcgtcgggaacgaaatctctcagaccaagaagcaacactgaatcaatgagcaaagcaattcaacagtacaccgtcgacgcaagactccacgccgttttcgaacaatccggcgaatcagggaaatcattcgactactcacaatcactcaaaacgacgacgtacggttcctctgtacctgagcaacagatcacagcttatctctctcgaatccagcgaggtggttacattcagcctttcggatgtatgatcgccgtcgatgaatccagtttccggatcatcggttacagtgaaaacgccagagaaatgttagggattatgcctcaatctgttcctactcttgagaaacctgagattctagctatgggaactgatgtgagatctttgttcacttcttcgagctcgattctactcgagcgtgctttcgttgctcgagagattaccttgttaaatccggtttggatccattccaagaatactggtaaaccgttttacgccattcttcataggattgatgttggtgttgttattgatttagagccagctagaactgaagatcctgcgctttctattgctggtgctgttcaatcgcagaaactcgcggttcgtgcgatttctcagttacaggctcttcctggtggagatattaagcttttgtgtgacactgtcgtggaaagtgtgagggacttgactggttatgatcgtgttatggtttataagtttcatgaagatgagcatggagaagttgtagctgagagtaaacgagatgatttagagccttatattggactgcatgttcctgctactgatattcctcaagcgtcaaggttcttgtttaagcagaaccgtgtccgaatgatagtagattgcaatgccacacctgttcttgtggtccaggacgataggctaactcagtctatgtgcttggttggttctactcttagggctcctcatggttgtcactctcagtatatggctaacatgggatctattgcgtctttagcaatggcggttataatcaatggaaatgaagatgatgggagcaatgtagctagtggaagaagctcgatgaggctttggggtttggttgtttgccatcacacttcttctcgctgcataccgtttccgctaaggtatgcttgtgagtttttgatgcaggctttcggtttacagttaaacatggaattgcagttagctttgcaaatgtcagagaaacgcgttttgagaacgcagacactgttatgtgatatgcttctgcgtgactcgcctgctggaattgttacacagagtcccagtatcatggacttagtgaaatgtgacggtgcagcatttctttaccacgggaagtattacccgttgggtgttgctcctagtgaagttcagataaaagatgttgtggagtggttgcttgcgaatcatgcggattcaaccggattaagcactgatagtttaggcgatgcggggtatcccggtgcagctgcgttaggggatgctgtgtgcggtatggcagttgcatatatcacaaaaagagactttcttttttggtttcgatctcacactgcgaaagaaatcaaatggggaggcgctaagcatcatccggaggataaagatgatgggcaacgaatgcatcctcgttcgtcctttcaggcttttcttgaagttgttaagagccggagtcagccatgggaaactgcggaaatggatgcgattcactcgctccagcttattctgagagactcttttaaagaatctgaggcggctatgaactctaaagttgtggatggtgtggttcagccatgtagggatatggcgggggaacaggggattgatgagttaggtgcagttgcaagagagatggttaggctcattgagactgcaactgttcctatattcgctgtggatgccggaggctgcatcaatggatggaacgctaagattgcagagttgacaggtctctcagttgaagaagctatggggaagtctctggtttctgatttaatatacaaagagaatgaagcaactgtcaataagcttctttctcgtgctttgagaggggacgaggaaaagaatgtggaggttaagctgaaaactttcagccccgaactacaagggaaagcagtttttgtggttgtgaatgcttgttccagcaaggactacttgaacaacattgtcggcgtttgttttgttggacaagacgttactagtcagaaaatcgtaatggataagttcatcaacatacaaggagattacaaggctattgtacatagcccaaaccctctaatcccgccaatttttgctgctgacgagaacacgtgctgcctggaatggaacatggcgatggaaaagcttacgggttggtctcgcagtgaagtgattgggaaaatgattgtcggggaagtgtttgggagctgttgcatgctaaagggtcctgatgctttaaccaagttcatgattgtattgcataatgcgattggtggccaagatacggataagttccctttcccattctttgaccgcaatgggaagtttgttcaggctctattgactgcaaacaagcgggttagcctcgagggaaaggttattggggctttctgtttcttgcaaatcccgagccctgagctgcagcaagctttagcagtccaacggaggcaggacacagagtgtttcacgaaggcaaaagagttggcttatatttgtcaggtgataaagaatcctttgagcggtatgcgtttcgcaaactcattgttggaggccacagacttgaacgaggaccagaagcagttacttgaaacaagtgtttcttgcgagaaacagatctcaaggatcgtcggggacatggatcttgaaagcattgaagacggttcatttgtgctaaagagggaagagtttttccttggaagtgtcataaacgcgattgtaagtcaagcgatgttcttattaagggacagaggtcttcagctgatccgtgacattcccgaagagatcaaatcaatagaggtttttggagaccagataaggattcaacagctcctggctgagtttctgctgagtataatccggtatgcaccatctcaagagtgggtggagatccatttaagccaactttcaaagcaaatggctgatggattcgccgccatccgcacagaattcagaatggcgtgtccaggtgaaggtctgcctccagagctagtccgagacatgttccatagcagcaggtggacaagccctgaaggtttaggtctaagcgtatgtcgaaagattttaaagctaatgaacggtgaggttcaatacatccgagaatcagaacggtcctatttcctcatcattctggaactccctgtacctcgaaagcgaccattgtcaactgctagtggaagtggtgacatgatgctgatgatgccatattagatggtttccggagtcgggggtagtggcggtggccgtggcggtggccgtggcggagaagaagaaccgtcgtcaagtcacactcctaataaccgaagaggaggagaacaagctcaatcgtcgggaacgaaatctctcagaccaagaagcaacactgaatcaatgagcaaagcaattcaacagtacaccgtcgacgcaagactccacgccgttttcgaacaatccggcgaatcagggaaatcattcgactactcacaatcactcaaaacgacgacgtacggttcctctgtacctgagcaacagatcacagcttatctctctcgaatccagcgaggtggttacattcagcctttcggatgtatgatcgccgtcgatgaatccagtttccggatcatcggttacagtgaaaacgccagagaaatgttagggattatgcctcaatctgttcctactcttgagaaacctgagattctagctatgggaactgatgtgagatctttgttcacttcttcgagctcgattctactcgagcgtgctttcgttgctcgagagattaccttgttaaatccggtttggatccattccaagaatactggtaaaccgttttacgccattcttcataggattgatgttggtgttgttattgatttagagccagctagaactgaagatcctgcgctttctattgctggtgctgttcaatcgcagaaactcgcggttcgtgcgatttctcagttacaggctcttcctggtggagatattaagcttttgtgtgacactgtcgtggaaagtgtgagggacttgactggttatgatcgtgttatggtttataagtttcatgaagatgagcatggagaagttgtagctgagagtaaacgagatgatttagagccttatattggactgcatgttcctgctactgatattcctcaagcgtcaaggttcttgtttaagcagaaccgtgtccgaatgatagtagattgcaatgccacacctgttcttgtggtccaggacgataggctaactcagtctatgtgcttggttggttctactcttagggctcctcatggttgtcactctcagtatatggctaacatgggatctattgcgtctttagcaatggcggttataatcaatggaaatgaagatgatgggagcaatgtagctagtggaagaagctcgatgaggctttggggtttggttgtttgccatcacacttcttctcgctgcataccgtttccgctaaggtatgcttgtgagtttttgatgcaggctttcggtttacagttaaacatggaattgcagttagctttgcaaatgtcagagaaacgcgttttgagaacgcagacactgttatgtgatatgcttctgcgtgactcgcctgctggaattgttacacagagtcccagtatcatggacttagtgaaatgtgacggtgcagcatttctttaccacgggaagtattacccgttgggtgttgctcctagtgaagttcagataaaagatgttgtggagtggttgcttgcgaatcatgcggattcaaccggattaagcactgatagtttaggcgatgcggggtatcccggtgcagctgcgttaggggatgctgtgtgcggtatggcagttgcatatatcacaaaaagagactttcttttttggtttcgatctcacactgcgaaagaaatcaaatggggaggcgctaagcatcatccggaggataaagatgatgggcaacgaatgcatcctcgttcgtcctttcaggcttttcttgaagttgttaagagccggagtcagccatgggaaactgcggaaatggatgcgattcactcgctccagcttattctgagagactcttttaaagaatctgaggcggctatgaactctaaagttgtggatggtgtggttcagccatgtagggatatggcgggggaacaggggattgatgagttaggtgcagttgcaagagagatggttaggctcattgagactgcaactgttcctatattcgctgtggatgccggaggctgcatcaatggatggaacgctaagattgcagagttgacaggtctctcagttgaagaagctatggggaagtctctggtttctgatttaatatacaaagagaatgaagcaactgtcaataagcttctttctcgtgctttgagaggggacgaggaaaagaatgtggaggttaagctgaaaactttcagccccgaactacaagggaaagcagtttttgtggttgtgaatgcttgttccagcaaggactacttgaacaacattgtcggcgtttgttttgttggacaagacgttactagtcagaaaatcgtaatggataagttcatcaacatacaaggagattacaaggctattgtacatagcccaaaccctctaatcccgccaatttttgctgctgacgagaacacgtgctgcctggaatggaacatggcgatggaaaagcttacgggttggtctcgcagtgaagtgattgggaaaatgattgtcggggaagtgtttgggagctgttgcatgctaaagggtcctgatgctttaaccaagttcatgattgtattgcataatgcgattggtggccaagatacggataagttccctttcccattctttgaccgcaatgggaagtttgttcaggctctattgactgcaaacaagcgggttagcctcgagggaaaggttattggggctttctgtttcttgcaaatcccgagccctgagctgcagcaagctttagcagtccaacggaggcaggacacagagtgtttcacgaaggcaaaagagttggcttatatttgtcaggtgataaagaatcctttgagcggtatgcgtttcgcaaactcattgttggaggccacagacttgaacgaggaccagaagcagttacttgaaacaagtgtttcttgcgagaaacagatctcaaggatcgtcggggacatggatcttgaaagcattgaagacggttcatttgtgctaaagagggaagagtttttccttggaagtgtcataaacgcgattgtaagtcaagcgatgttcttattaagggacagaggtcttcagctgatccgtgacattcccgaagagatcaaatcaatagaggtttttggagaccagataaggattcaacagctcctggctgagtttctgctgagtataatccggtatgcaccatctcaagagtgggtggagatccatttaagccaactttcaaagcaaatggctgatggattcgccgccatccgcacagaattcagaatggcgtgtccaggtgaaggtctgcctccagagctagtccgagacatgttccatagcagcaggtggacaagccctgaaggtttaggtctaagcgtatgtcgaaagattttaaagctaatgaacggtgaggttcaatacatccgagaatcagaacggtcctatttcctcatcattctggaactccctgtacctcgaaagcgaccattgtcaactgctagtggaagtggtgacatgatgctgatgatgccatattagatggtttccggagtcgggggtagtggcggtggccgtggcggtggccgtggcggagaagaagaaccgtcgtcaagtcacactcctaataaccgaagaggaggagaacaagctcaatcgtcgggaacgaaatctctcagaccaagaagcaacactgaatcaatgagcaaagcaattcaacagtacaccgtcgacgcaagactccacgccgttttcgaacaatccggcgaatcagggaaatcattcgactactcacaatcactcaaaacgacgacgtacggttcctctgtacctgagcaacagatcacagcttatctctctcgaatccagcgaggtggttacattcagcctttcggatgtatgatcgccgtcgatgaatccagtttccggatcatcggttacagtgaaaacgccagagaaatgttagggattatgcctcaatctgttcctactcttgagaaacctgagattctagctatgggaactgatgtgagatctttgttcacttcttcgagctcgattctactcgagcgtgctttcgttgctcgagagattaccttgttaaatccggtttggatccattccaagaatactggtaaaccgttttacgccattcttcataggattgatgttggtgttgttattgatttagagccagctagaactgaagatcctgcgctttctattgctggtgctgttcaatcgcagaaactcgcggttcgtgcgatttctcagttacaggctcttcctggtggagatattaagcttttgtgtgacactgtcgtggaaagtgtgagggacttgactggttatgatcgtgttatggtttataagtttcatgaagatgagcatggagaagttgtagctgagagtaaacgagatgatttagagccttatattggactgcatgttcctgctactgatattcctcaagcgtcaaggttcttgtttaagcagaaccgtgtccgaatgatagtagattgcaatgccacacctgttcttgtggtccaggacgataggctaactcagtctatgtgcttggttggttctactcttagggctcctcatggttgtcactctcagtatatggctaacatgggatctattgcgtctttagcaatggcggttataatcaatggaaatgaagatgatgggagcaatgtagctagtggaagaagctcgatgaggctttggggtttggttgtttgccatcacacttcttctcgctgcataccgtttccgctaaggtatgcttgtgagtttttgatgcaggctttcggtttacagttaaacatggaattgcagttagctttgcaaatgtcagagaaacgcgttttgagaacgcagacactgttatgtgatatgcttctgcgtgactcgcctgctggaattgttacacagagtcccagtatcatggacttagtgaaatgtgacggtgcagcatttctttaccacgggaagtattacccgttgggtgttgctcctagtgaagttcagataaaagatgttgtggagtggttgcttgcgaatcatgcggattcaaccggattaagcactgatagtttaggcgatgcggggtatcccggtgcagctgcgttaggggatgctgtgtgcggtatggcagttgcatatatcacaaaaagagactttcttttttggtttcgatctcacactgcgaaagaaatcaaatggggaggcgctaagcatcatccggaggataaagatgatgggcaacgaatgcatcctcgttcgtcctttcaggcttttcttgaagttgttaagagccggagtcagccatgggaaactgcggaaatggatgcgattcactcgctccagcttattctgagagactcttttaaagaatctgaggcggctatgaactctaaagttgtggatggtgtggttcagccatgtagggatatggcgggggaacaggggattgatgagttaggtgcagttgcaagagagatggttaggctcattgagactgcaactgttcctatattcgctgtggatgccggaggctgcatcaatggatggaacgctaagattgcagagttgacaggtctctcagttgaagaagctatggggaagtctctggtttctgatttaatatacaaagagaatgaagcaactgtcaataagcttctttctcgtgctttgagaggggacgaggaaaagaatgtggaggttaagctgaaaactttcagccccgaactacaagggaaagcagtttttgtggttgtgaatgcttgttccagcaaggactacttgaacaacattgtcggcgtttgttttgttggacaagacgttactagtcagaaaatcgtaatggataagttcatcaacatacaaggagattacaaggctattgtacatagcccaaaccctctaatcccgccaatttttgctgctgacgagaacacgtgctgcctggaatggaacatggcgatggaaaagcttacgggttggtctcgcagtgaagtgattgggaaaatgattgtcggggaagtgtttgggagctgttgcatgctaaagggtcctgatgctttaaccaagttcatgattgtattgcataatgcgattggtggccaagatacggataagttccctttcccattctttgaccgcaatgggaagtttgttcaggctctattgactgcaaacaagcgggttagcctcgagggaaaggttattggggctttctgtttcttgcaaatcccgagccctgagctgcagcaagctttagcagtccaacggaggcaggacacagagtgtttcacgaaggcaaaagagttggcttatatttgtcaggtgataaagaatcctttgagcggtatgcgtttcgcaaactcattgttggaggccacagacttgaacgaggaccagaagcagttacttgaaacaagtgtttcttgcgagaaacagatctcaaggatcgtcggggacatggatcttgaaagcattgaagacggttcatttgtgctaaagagggaagagtttttccttggaagtgtcataaacgcgattgtaagtcaagcgatgttcttattaagggacagaggtcttcagctgatccgtgacattcccgaagagatcaaatcaatagaggtttttggagaccagataaggattcaacagctcctggctgagtttctgctgagtataatccggtatgcaccatctcaagagtgggtggagatccatttaagccaactttcaaagcaaatggctgatggattcgccgccatccgcacagaattcagaatggcgtgtccaggtgaaggtctgcctccagagctagtccgagacatgttccatagcagcaggtggacaagccctgaaggtttaggtctaagcgtatgtcgaaagattttaaagctaatgaacggtgaggttcaatacatccgagaatcagaacggtcctatttcctcatcattctggaactccctgtacctcgaaagcgaccattgtcaactgctagtggaagtggtgacatgatgctgatgatgccatattagatggtttccggagtcgggggtagtggcggtggccgtggcggtggccgtggcggagaagaagaaccgtcgtcaagtcacactcctaataaccgaagaggaggagaacaagctcaatcgtcgggaacgaaatctctcagaccaagaagcaacactgaatcaatgagcaaagcaattcaacagtacaccgtcgacgcaagactccacgccgttttcgaacaatccggcgaatcagggaaatcattcgactactcacaatcactcaaaacgacgacgtacggttcctctgtacctgagcaacagatcacagcttatctctctcgaatccagcgaggtggttacattcagcctttcggatgtatgatcgccgtcgatgaatccagtttccggatcatcggttacagtgaaaacgccagagaaatgttagggattatgcctcaatctgttcctactcttgagaaacctgagattctagctatgggaactgatgtgagatctttgttcacttcttcgagctcgattctactcgagcgtgctttcgttgctcgagagattaccttgttaaatccggtttggatccattccaagaatactggtaaaccgttttacgccattcttcataggattgatgttggtgttgttattgatttagagccagctagaactgaagatcctgcgctttctattgctggtgctgttcaatcgcagaaactcgcggttcgtgcgatttctcagttacaggctcttcctggtggagatattaagcttttgtgtgacactgtcgtggaaagtgtgagggacttgactggttatgatcgtgttatggtttataagtttcatgaagatgagcatggagaagttgtagctgagagtaaacgagatgatttagagccttatattggactgcatgttcctgctactgatattcctcaagcgtcaaggttcttgtttaagcagaaccgtgtccgaatgatagtagattgcaatgccacacctgttcttgtggtccaggacgataggctaactcagtctatgtgcttggttggttctactcttagggctcctcatggttgtcactctcagtatatggctaacatgggatctattgcgtctttagcaatggcggttataatcaatggaaatgaagatgatgggagcaatgtagctagtggaagaagctcgatgaggctttggggtttggttgtttgccatcacacttcttctcgctgcataccgtttccgctaaggtatgcttgtgagtttttgatgcaggctttcggtttacagttaaacatggaattgcagttagctttgcaaatgtcagagaaacgcgttttgagaacgcagacactgttatgtgatatgcttctgcgtgactcgcctgctggaattgttacacagagtcccagtatcatggacttagtgaaatgtgacggtgcagcatttctttaccacgggaagtattacccgttgggtgttgctcctagtgaagttcagataaaagatgttgtggagtggttgcttgcgaatcatgcggattcaaccggattaagcactgatagtttaggcgatgcggggtatcccggtgcagctgcgttaggggatgctgtgtgcggtatggcagttgcatatatcacaaaaagagactttcttttttggtttcgatctcacactgcgaaagaaatcaaatggggaggcgctaagcatcatccggaggataaagatgatgggcaacgaatgcatcctcgttcgtcctttcaggcttttcttgaagttgttaagagccggagtcagccatgggaaactgcggaaatggatgcgattcactcgctccagcttattctgagagactcttttaaagaatctgaggcggctatgaactctaaagttgtggatggtgtggttcagccatgtagggatatggcgggggaacaggggattgatgagttaggtgcagttgcaagagagatggttaggctcattgagactgcaactgttcctatattcgctgtggatgccggaggctgcatcaatggatggaacgctaagattgcagagttgacaggtctctcagttgaagaagctatggggaagtctctggtttctgatttaatatacaaagagaatgaagcaactgtcaataagcttctttctcgtgctttgagaggggacgaggaaaagaatgtggaggttaagctgaaaactttcagccccgaactacaagggaaagcagtttttgtggttgtgaatgcttgttccagcaaggactacttgaacaacattgtcggcgtttgttttgttggacaagacgttactagtcagaaaatcgtaatggataagttcatcaacatacaaggagattacaaggctattgtacatagcccaaaccctctaatcccgccaatttttgctgctgacgagaacacgtgctgcctggaatggaacatggcgatggaaaagcttacgggttggtctcgcagtgaagtgattgggaaaatgattgtcggggaagtgtttgggagctgttgcatgctaaagggtcctgatgctttaaccaagttcatgattgtattgcataatgcgattggtggccaagatacggataagttccctttcccattctttgaccgcaatgggaagtttgttcaggctctattgactgcaaacaagcgggttagcctcgagggaaaggttattggggctttctgtttcttgcaaatcccgagccctgagctgcagcaagctttagcagtccaacggaggcaggacacagagtgtttcacgaaggcaaaagagttggcttatatttgtcaggtgataaagaatcctttgagcggtatgcgtttcgcaaactcattgttggaggccacagacttgaacgaggaccagaagcagttacttgaaacaagtgtttcttgcgagaaacagatctcaaggatcgtcggggacatggatcttgaaagcattgaagacggttcatttgtgctaaagagggaagagtttttccttggaagtgtcataaacgcgattgtaagtcaagcgatgttcttattaagggacagaggtcttcagctgatccgtgacattcccgaagagatcaaatcaatagaggtttttggagaccagataaggattcaacagctcctggctgagtttctgctgagtataatccggtatgcaccatctcaagagtgggtggagatccatttaagccaactttcaaagcaaatggctgatggattcgccgccatccgcacagaattcagaatggcgtgtccaggtgaaggtctgcctccagagctagtccgagacatgttccatagcagcaggtggacaagccctgaaggtttaggtctaagcgtatgtcgaaagattttaaagctaatgaacggtgaggttcaatacatccgagaatcagaacggtcctatttcctcatcattctggaactccctgtacctcgaaagcgaccattgtcaactgctagtggaagtggtgacatgatgctgatgatgccatattagatggtttccggagtcgggggtagtggcggtggccgtggcggtggccgtggcggagaagaagaaccgtcgtcaagtcacactcctaataaccgaagaggaggagaacaagctcaatcgtcgggaacgaaatctctcagaccaagaagcaacactgaatcaatgagcaaagcaattcaacagtacaccgtcgacgcaagactccacgccgttttcgaacaatccggcgaatcagggaaatcattcgactactcacaatcactcaaaacgacgacgtacggttcctctgtacctgagcaacagatcacagcttatctctctcgaatccagcgaggtggttacattcagcctttcggatgtatgatcgccgtcgatgaatccagtttccggatcatcggttacagtgaaaacgccagagaaatgttagggattatgcctcaatctgttcctactcttgagaaacctgagattctagctatgggaactgatgtgagatctttgttcacttcttcgagctcgattctactcgagcgtgctttcgttgctcgagagattaccttgttaaatccggtttggatccattccaagaatactggtaaaccgttttacgccattcttcataggattgatgttggtgttgttattgatttagagccagctagaactgaagatcctgcgctttctattgctggtgctgttcaatcgcagaaactcgcggttcgtgcgatttctcagttacaggctcttcctggtggagatattaagcttttgtgtgacactgtcgtggaaagtgtgagggacttgactggttatgatcgtgttatggtttataagtttcatgaagatgagcatggagaagttgtagctgagagtaaacgagatgatttagagccttatattggactgcatgttcctgctactgatattcctcaagcgtcaaggttcttgtttaagcagaaccgtgtccgaatgatagtagattgcaatgccacacctgttcttgtggtccaggacgataggctaactcagtctatgtgcttggttggttctactcttagggctcctcatggttgtcactctcagtatatggctaacatgggatctattgcgtctttagcaatggcggttataatcaatggaaatgaagatgatgggagcaatgtagctagtggaagaagctcgatgaggctttggggtttggttgtttgccatcacacttcttctcgctgcataccgtttccgctaaggtatgcttgtgagtttttgatgcaggctttcggtttacagttaaacatggaattgcagttagctttgcaaatgtcagagaaacgcgttttgagaacgcagacactgttatgtgatatgcttctgcgtgactcgcctgctggaattgttacacagagtcccagtatcatggacttagtgaaatgtgacggtgcagcatttctttaccacgggaagtattacccgttgggtgttgctcctagtgaagttcagataaaagatgttgtggagtggttgcttgcgaatcatgcggattcaaccggattaagcactgatagtttaggcgatgcggggtatcccggtgcagctgcgttaggggatgctgtgtgcggtatggcagttgcatatatcacaaaaagagactttcttttttggtttcgatctcacactgcgaaagaaatcaaatggggaggcgctaagcatcatccggaggataaagatgatgggcaacgaatgcatcctcgttcgtcctttcaggcttttcttgaagttgttaagagccggagtcagccatgggaaactgcggaaatggatgcgattcactcgctccagcttattctgagagactcttttaaagaatctgaggcggctatgaactctaaagttgtggatggtgtggttcagccatgtagggatatggcgggggaacaggggattgatgagttaggtgcagttgcaagagagatggttaggctcattgagactgcaactgttcctatattcgctgtggatgccggaggctgcatcaatggatggaacgctaagattgcagagttgacaggtctctcagttgaagaagctatggggaagtctctggtttctgatttaatatacaaagagaatgaagcaactgtcaataagcttctttctcgtgctttgagaggggacgaggaaaagaatgtggaggttaagctgaaaactttcagccccgaactacaagggaaagcagtttttgtggttgtgaatgcttgttccagcaaggactacttgaacaacattgtcggcgtttgttttgttggacaagacgttactagtcagaaaatcgtaatggataagttcatcaacatacaaggagattacaaggctattgtacatagcccaaaccctctaatcccgccaatttttgctgctgacgagaacacgtgctgcctggaatggaacatggcgatggaaaagcttacgggttggtctcgcagtgaagtgattgggaaaatgattgtcggggaagtgtttgggagctgttgcatgctaaagggtcctgatgctttaaccaagttcatgattgtattgcataatgcgattggtggccaagatacggataagttccctttcccattctttgaccgcaatgggaagtttgttcaggctctattgactgcaaacaagcgggttagcctcgagggaaaggttattggggctttctgtttcttgcaaatcccgagccctgagctgcagcaagctttagcagtccaacggaggcaggacacagagtgtttcacgaaggcaaaagagttggcttatatttgtcaggtgataaagaatcctttgagcggtatgcgtttcgcaaactcattgttggaggccacagacttgaacgaggaccagaagcagttacttgaaacaagtgtttcttgcgagaaacagatctcaaggatcgtcggggacatggatcttgaaagcattgaagacggttcatttgtgctaaagagggaagagtttttccttggaagtgtcataaacgcgattgtaagtcaagcgatgttcttattaagggacagaggtcttcagctgatccgtgacattcccgaagagatcaaatcaatagaggtttttggagaccagataaggattcaacagctcctggctgagtttctgctgagtataatccggtatgcaccatctcaagagtgggtggagatccatttaagccaactttcaaagcaaatggctgatggattcgccgccatccgcacagaattcagaatggcgtgtccaggtgaaggtctgcctccagagctagtccgagacatgttccatagcagcaggtggacaagccctgaaggtttaggtctaagcgtatgtcgaaagattttaaagctaatgaacggtgaggttcaatacatccgagaatcagaacggtcctatttcctcatcattctggaactccctgtacctcgaaagcgaccattgtcaactgctagtggaagtggtgacatgatgctgatgatgccatattagatggtttccggagtcgggggtagtggcggtggccgtggcggtggccgtggcggagaagaagaaccgtcgtcaagtcacactcctaataaccgaagaggaggagaacaagctcaatcgtcgggaacgaaatctctcagaccaagaagcaacactgaatcaatgagcaaagcaattcaacagtacaccgtcgacgcaagactccacgccgttttcgaacaatccggcgaatcagggaaatcattcgactactcacaatcactcaaaacgacgacgtacggttcctctgtacctgagcaacagatcacagcttatctctctcgaatccagcgaggtggttacattcagcctttcggatgtatgatcgccgtcgatgaatccagtttccggatcatcggttacagtgaaaacgccagagaaatgttagggattatgcctcaatctgttcctactcttgagaaacctgagattctagctatgggaactgatgtgagatctttgttcacttcttcgagctcgattctactcgagcgtgctttcgttgctcgagagattaccttgttaaatccggtttggatccattccaagaatactggtaaaccgttttacgccattcttcataggattgatgttggtgttgttattgatttagagccagctagaactgaagatcctgcgctttctattgctggtgctgttcaatcgcagaaactcgcggttcgtgcgatttctcagttacaggctcttcctggtggagatattaagcttttgtgtgacactgtcgtggaaagtgtgagggacttgactggttatgatcgtgttatggtttataagtttcatgaagatgagcatggagaagttgtagctgagagtaaacgagatgatttagagccttatattggactgcatgttcctgctactgatattcctcaagcgtcaaggttcttgtttaagcagaaccgtgtccgaatgatagtagattgcaatgccacacctgttcttgtggtccaggacgataggctaactcagtctatgtgcttggttggttctactcttagggctcctcatggttgtcactctcagtatatggctaacatgggatctattgcgtctttagcaatggcggttataatcaatggaaatgaagatgatgggagcaatgtagctagtggaagaagctcgatgaggctttggggtttggttgtttgccatcacacttcttctcgctgcataccgtttccgctaaggtatgcttgtgagtttttgatgcaggctttcggtttacagttaaacatggaattgcagttagctttgcaaatgtcagagaaacgcgttttgagaacgcagacactgttatgtgatatgcttctgcgtgactcgcctgctggaattgttacacagagtcccagtatcatggacttagtgaaatgtgacggtgcagcatttctttaccacgggaagtattacccgttgggtgttgctcctagtgaagttcagataaaagatgttgtggagtggttgcttgcgaatcatgcggattcaaccggattaagcactgatagtttaggcgatgcggggtatcccggtgcagctgcgttaggggatgctgtgtgcggtatggcagttgcatatatcacaaaaagagactttcttttttggtttcgatctcacactgcgaaagaaatcaaatggggaggcgctaagcatcatccggaggataaagatgatgggcaacgaatgcatcctcgttcgtcctttcaggcttttcttgaagttgttaagagccggagtcagccatgggaaactgcggaaatggatgcgattcactcgctccagcttattctgagagactcttttaaagaatctgaggcggctatgaactctaaagttgtggatggtgtggttcagccatgtagggatatggcgggggaacaggggattgatgagttaggtgcagttgcaagagagatggttaggctcattgagactgcaactgttcctatattcgctgtggatgccggaggctgcatcaatggatggaacgctaagattgcagagttgacaggtctctcagttgaagaagctatggggaagtctctggtttctgatttaatatacaaagagaatgaagcaactgtcaataagcttctttctcgtgctttgagaggggacgaggaaaagaatgtggaggttaagctgaaaactttcagccccgaactacaagggaaagcagtttttgtggttgtgaatgcttgttccagcaaggactacttgaacaacattgtcggcgtttgttttgttggacaagacgttactagtcagaaaatcgtaatggataagttcatcaacatacaaggagattacaaggctattgtacatagcccaaaccctctaatcccgccaatttttgctgctgacgagaacacgtgctgcctggaatggaacatggcgatggaaaagcttacgggttggtctcgcagtgaagtgattgggaaaatgattgtcggggaagtgtttgggagctgttgcatgctaaagggtcctgatgctttaaccaagttcatgattgtattgcataatgcgattggtggccaagatacggataagttccctttcccattctttgaccgcaatgggaagtttgttcaggctctattgactgcaaacaagcgggttagcctcgagggaaaggttattggggctttctgtttcttgcaaatcccgagccctgagctgcagcaagctttagcagtccaacggaggcaggacacagagtgtttcacgaaggcaaaagagttggcttatatttgtcaggtgataaagaatcctttgagcggtatgcgtttcgcaaactcattgttggaggccacagacttgaacgaggaccagaagcagttacttgaaacaagtgtttcttgcgagaaacagatctcaaggatcgtcggggacatggatcttgaaagcattgaagacggttcatttgtgctaaagagggaagagtttttccttggaagtgtcataaacgcgattgtaagtcaagcgatgttcttattaagggacagaggtcttcagctgatccgtgacattcccgaagagatcaaatcaatagaggtttttggagaccagataaggattcaacagctcctggctgagtttctgctgagtataatccggtatgcaccatctcaagagtgggtggagatccatttaagccaactttcaaagcaaatggctgatggattcgccgccatccgcacagaattcagaatggcgtgtccaggtgaaggtctgcctccagagctagtccgagacatgttccatagcagcaggtggacaagccctgaaggtttaggtctaagcgtatgtcgaaagattttaaagctaatgaacggtgaggttcaatacatccgagaatcagaacggtcctatttcctcatcattctggaactccctgtacctcgaaagcgaccattgtcaactgctagtggaagtggtgacatgatgctgatgatgccatattagatggtttccggagtcgggggtagtggcggtggccgtggcggtggccgtggcggagaagaagaaccgtcgtcaagtcacactcctaataaccgaagaggaggagaacaagctcaatcgtcgggaacgaaatctctcagaccaagaagcaacactgaatcaatgagcaaagcaattcaacagtacaccgtcgacgcaagactccacgccgttttcgaacaatccggcgaatcagggaaatcattcgactactcacaatcactcaaaacgacgacgtacggttcctctgtacctgagcaacagatcacagcttatctctctcgaatccagcgaggtggttacattcagcctttcggatgtatgatcgccgtcgatgaatccagtttccggatcatcggttacagtgaaaacgccagagaaatgttagggattatgcctcaatctgttcctactcttgagaaacctgagattctagctatgggaactgatgtgagatctttgttcacttcttcgagctcgattctactcgagcgtgctttcgttgctcgagagattaccttgttaaatccggtttggatccattccaagaatactggtaaaccgttttacgccattcttcataggattgatgttggtgttgttattgatttagagccagctagaactgaagatcctgcgctttctattgctggtgctgttcaatcgcagaaactcgcggttcgtgcgatttctcagttacaggctcttcctggtggagatattaagcttttgtgtgacactgtcgtggaaagtgtgagggacttgactggttatgatcgtgttatggtttataagtttcatgaagatgagcatggagaagttgtagctgagagtaaacgagatgatttagagccttatattggactgcatgttcctgctactgatattcctcaagcgtcaaggttcttgtttaagcagaaccgtgtccgaatgatagtagattgcaatgccacacctgttcttgtggtccaggacgataggctaactcagtctatgtgcttggttggttctactcttagggctcctcatggttgtcactctcagtatatggctaacatgggatctattgcgtctttagcaatggcggttataatcaatggaaatgaagatgatgggagcaatgtagctagtggaagaagctcgatgaggctttggggtttggttgtttgccatcacacttcttctcgctgcataccgtttccgctaaggtatgcttgtgagtttttgatgcaggctttcggtttacagttaaacatggaattgcagttagctttgcaaatgtcagagaaacgcgttttgagaacgcagacactgttatgtgatatgcttctgcgtgactcgcctgctggaattgttacacagagtcccagtatcatggacttagtgaaatgtgacggtgcagcatttctttaccacgggaagtattacccgttgggtgttgctcctagtgaagttcagataaaagatgttgtggagtggttgcttgcgaatcatgcggattcaaccggattaagcactgatagtttaggcgatgcggggtatcccggtgcagctgcgttaggggatgctgtgtgcggtatggcagttgcatatatcacaaaaagagactttcttttttggtttcgatctcacactgcgaaagaaatcaaatggggaggcgctaagcatcatccggaggataaagatgatgggcaacgaatgcatcctcgttcgtcctttcaggcttttcttgaagttgttaagagccggagtcagccatgggaaactgcggaaatggatgcgattcactcgctccagcttattctgagagactcttttaaagaatctgaggcggctatgaactctaaagttgtggatggtgtggttcagccatgtagggatatggcgggggaacaggggattgatgagttaggtgcagttgcaagagagatggttaggctcattgagactgcaactgttcctatattcgctgtggatgccggaggctgcatcaatggatggaacgctaagattgcagagttgacaggtctctcagttgaagaagctatggggaagtctctggtttctgatttaatatacaaagagaatgaagcaactgtcaataagcttctttctcgtgctttgagaggggacgaggaaaagaatgtggaggttaagctgaaaactttcagccccgaactacaagggaaagcagtttttgtggttgtgaatgcttgttccagcaaggactacttgaacaacattgtcggcgtttgttttgttggacaagacgttactagtcagaaaatcgtaatggataagttcatcaacatacaaggagattacaaggctattgtacatagcccaaaccctctaatcccgccaatttttgctgctgacgagaacacgtgctgcctggaatggaacatggcgatggaaaagcttacgggttggtctcgcagtgaagtgattgggaaaatgattgtcggggaagtgtttgggagctgttgcatgctaaagggtcctgatgctttaaccaagttcatgattgtattgcataatgcgattggtggccaagatacggataagttccctttcccattctttgaccgcaatgggaagtttgttcaggctctattgactgcaaacaagcgggttagcctcgagggaaaggttattggggctttctgtttcttgcaaatcccgagccctgagctgcagcaagctttagcagtccaacggaggcaggacacagagtgtttcacgaaggcaaaagagttggcttatatttgtcaggtgataaagaatcctttgagcggtatgcgtttcgcaaactcattgttggaggccacagacttgaacgaggaccagaagcagttacttgaaacaagtgtttcttgcgagaaacagatctcaaggatcgtcggggacatggatcttgaaagcattgaagacggttcatttgtgctaaagagggaagagtttttccttggaagtgtcataaacgcgattgtaagtcaagcgatgttcttattaagggacagaggtcttcagctgatccgtgacattcccgaagagatcaaatcaatagaggtttttggagaccagataaggattcaacagctcctggctgagtttctgctgagtataatccggtatgcaccatctcaagagtgggtggagatccatttaagccaactttcaaagcaaatggctgatggattcgccgccatccgcacagaattcagaatggcgtgtccaggtgaaggtctgcctccagagctagtccgagacatgttccatagcagcaggtggacaagccctgaaggtttaggtctaagcgtatgtcgaaagattttaaagctaatgaacggtgaggttcaatacatccgagaatcagaacggtcctatttcctcatcattctggaactccctgtacctcgaaagcgaccattgtcaactgctagtggaagtggtgacatgatgctgatgatgccatattagatggtttccggagtcgggggtagtggcggtggccgtggcggtggccgtggcggagaagaagaaccgtcgtcaagtcacactcctaataaccgaagaggaggagaacaagctcaatcgtcgggaacgaaatctctcagaccaagaagcaacactgaatcaatgagcaaagcaattcaacagtacaccgtcgacgcaagactccacgccgttttcgaacaatccggcgaatcagggaaatcattcgactactcacaatcactcaaaacgacgacgtacggttcctctgtacctgagcaacagatcacagcttatctctctcgaatccagcgaggtggttacattcagcctttcggatgtatgatcgccgtcgatgaatccagtttccggatcatcggttacagtgaaaacgccagagaaatgttagggattatgcctcaatctgttcctactcttgagaaacctgagattctagctatgggaactgatgtgagatctttgttcacttcttcgagctcgattctactcgagcgtgctttcgttgctcgagagattaccttgttaaatccggtttggatccattccaagaatactggtaaaccgttttacgccattcttcataggattgatgttggtgttgttattgatttagagccagctagaactgaagatcctgcgctttctattgctggtgctgttcaatcgcagaaactcgcggttcgtgcgatttctcagttacaggctcttcctggtggagatattaagcttttgtgtgacactgtcgtggaaagtgtgagggacttgactggttatgatcgtgttatggtttataagtttcatgaagatgagcatggagaagttgtagctgagagtaaacgagatgatttagagccttatattggactgcatgttcctgctactgatattcctcaagcgtcaaggttcttgtttaagcagaaccgtgtccgaatgatagtagattgcaatgccacacctgttcttgtggtccaggacgataggctaactcagtctatgtgcttggttggttctactcttagggctcctcatggttgtcactctcagtatatggctaacatgggatctattgcgtctttagcaatggcggttataatcaatggaaatgaagatgatgggagcaatgtagctagtggaagaagctcgatgaggctttggggtttggttgtttgccatcacacttcttctcgctgcataccgtttccgctaaggtatgcttgtgagtttttgatgcaggctttcggtttacagttaaacatggaattgcagttagctttgcaaatgtcagagaaacgcgttttgagaacgcagacactgttatgtgatatgcttctgcgtgactcgcctgctggaattgttacacagagtcccagtatcatggacttagtgaaatgtgacggtgcagcatttctttaccacgggaagtattacccgttgggtgttgctcctagtgaagttcagataaaagatgttgtggagtggttgcttgcgaatcatgcggattcaaccggattaagcactgatagtttaggcgatgcggggtatcccggtgcagctgcgttaggggatgctgtgtgcggtatggcagttgcatatatcacaaaaagagactttcttttttggtttcgatctcacactgcgaaagaaatcaaatggggaggcgctaagcatcatccggaggataaagatgatgggcaacgaatgcatcctcgttcgtcctttcaggcttttcttgaagttgttaagagccggagtcagccatgggaaactgcggaaatggatgcgattcactcgctccagcttattctgagagactcttttaaagaatctgaggcggctatgaactctaaagttgtggatggtgtggttcagccatgtagggatatggcgggggaacaggggattgatgagttaggtgcagttgcaagagagatggttaggctcattgagactgcaactgttcctatattcgctgtggatgccggaggctgcatcaatggatggaacgctaagattgcagagttgacaggtctctcagttgaagaagctatggggaagtctctggtttctgatttaatatacaaagagaatgaagcaactgtcaataagcttctttctcgtgctttgagaggggacgaggaaaagaatgtggaggttaagctgaaaactttcagccccgaactacaagggaaagcagtttttgtggttgtgaatgcttgttccagcaaggactacttgaacaacattgtcggcgtttgttttgttggacaagacgttactagtcagaaaatcgtaatggataagttcatcaacatacaaggagattacaaggctattgtacatagcccaaaccctctaatcccgccaatttttgctgctgacgagaacacgtgctgcctggaatggaacatggcgatggaaaagcttacgggttggtctcgcagtgaagtgattgggaaaatgattgtcggggaagtgtttgggagctgttgcatgctaaagggtcctgatgctttaaccaagttcatgattgtattgcataatgcgattggtggccaagatacggataagttccctttcccattctttgaccgcaatgggaagtttgttcaggctctattgactgcaaacaagcgggttagcctcgagggaaaggttattggggctttctgtttcttgcaaatcccgagccctgagctgcagcaagctttagcagtccaacggaggcaggacacagagtgtttcacgaaggcaaaagagttggcttatatttgtcaggtgataaagaatcctttgagcggtatgcgtttcgcaaactcattgttggaggccacagacttgaacgaggaccagaagcagttacttgaaacaagtgtttcttgcgagaaacagatctcaaggatcgtcggggacatggatcttgaaagcattgaagacggttcatttgtgctaaagagggaagagtttttccttggaagtgtcataaacgcgattgtaagtcaagcgatgttcttattaagggacagaggtcttcagctgatccgtgacattcccgaagagatcaaatcaatagaggtttttggagaccagataaggattcaacagctcctggctgagtttctgctgagtataatccggtatgcaccatctcaagagtgggtggagatccatttaagccaactttcaaagcaaatggctgatggattcgccgccatccgcacagaattcagaatggcgtgtccaggtgaaggtctgcctccagagctagtccgagacatgttccatagcagcaggtggacaagccctgaaggtttaggtctaagcgtatgtcgaaagattttaaagctaatgaacggtgaggttcaatacatccgagaatcagaacggtcctatttcctcatcattctggaactccctgtacctcgaaagcgaccattgtcaactgctagtggaagtggtgacatgatgctgatgatgccatattagatggtttccggagtcgggggtagtggcggtggccgtggcggtggccgtggcggagaagaagaaccgtcgtcaagtcacactcctaataaccgaagaggaggagaacaagctcaatcgtcgggaacgaaatctctcagaccaagaagcaacactgaatcaatgagcaaagcaattcaacagtacaccgtcgacgcaagactccacgccgttttcgaacaatccggcgaatcagggaaatcattcgactactcacaatcactcaaaacgacgacgtacggttcctctgtacctgagcaacagatcacagcttatctctctcgaatccagcgaggtggttacattcagcctttcggatgtatgatcgccgtcgatgaatccagtttccggatcatcggttacagtgaaaacgccagagaaatgttagggattatgcctcaatctgttcctactcttgagaaacctgagattctagctatgggaactgatgtgagatctttgttcacttcttcgagctcgattctactcgagcgtgctttcgttgctcgagagattaccttgttaaatccggtttggatccattccaagaatactggtaaaccgttttacgccattcttcataggattgatgttggtgttgttattgatttagagccagctagaactgaagatcctgcgctttctattgctggtgctgttcaatcgcagaaactcgcggttcgtgcgatttctcagttacaggctcttcctggtggagatattaagcttttgtgtgacactgtcgtggaaagtgtgagggacttgactggttatgatcgtgttatggtttataagtttcatgaagatgagcatggagaagttgtagctgagagtaaacgagatgatttagagccttatattggactgcatgttcctgctactgatattcctcaagcgtcaaggttcttgtttaagcagaaccgtgtccgaatgatagtagattgcaatgccacacctgttcttgtggtccaggacgataggctaactcagtctatgtgcttggttggttctactcttagggctcctcatggttgtcactctcagtatatggctaacatgggatctattgcgtctttagcaatggcggttataatcaatggaaatgaagatgatgggagcaatgtagctagtggaagaagctcgatgaggctttggggtttggttgtttgccatcacacttcttctcgctgcataccgtttccgctaaggtatgcttgtgagtttttgatgcaggctttcggtttacagttaaacatggaattgcagttagctttgcaaatgtcagagaaacgcgttttgagaacgcagacactgttatgtgatatgcttctgcgtgactcgcctgctggaattgttacacagagtcccagtatcatggacttagtgaaatgtgacggtgcagcatttctttaccacgggaagtattacccgttgggtgttgctcctagtgaagttcagataaaagatgttgtggagtggttgcttgcgaatcatgcggattcaaccggattaagcactgatagtttaggcgatgcggggtatcccggtgcagctgcgttaggggatgctgtgtgcggtatggcagttgcatatatcacaaaaagagactttcttttttggtttcgatctcacactgcgaaagaaatcaaatggggaggcgctaagcatcatccggaggataaagatgatgggcaacgaatgcatcctcgttcgtcctttcaggcttttcttgaagttgttaagagccggagtcagccatgggaaactgcggaaatggatgcgattcactcgctccagcttattctgagagactcttttaaagaatctgaggcggctatgaactctaaagttgtggatggtgtggttcagccatgtagggatatggcgggggaacaggggattgatgagttaggtgcagttgcaagagagatggttaggctcattgagactgcaactgttcctatattcgctgtggatgccggaggctgcatcaatggatggaacgctaagattgcagagttgacaggtctctcagttgaagaagctatggggaagtctctggtttctgatttaatatacaaagagaatgaagcaactgtcaataagcttctttctcgtgctttgagaggggacgaggaaaagaatgtggaggttaagctgaaaactttcagccccgaactacaagggaaagcagtttttgtggttgtgaatgcttgttccagcaaggactacttgaacaacattgtcggcgtttgttttgttggacaagacgttactagtcagaaaatcgtaatggataagttcatcaacatacaaggagattacaaggctattgtacatagcccaaaccctctaatcccgccaatttttgctgctgacgagaacacgtgctgcctggaatggaacatggcgatggaaaagcttacgggttggtctcgcagtgaagtgattgggaaaatgattgtcggggaagtgtttgggagctgttgcatgctaaagggtcctgatgctttaaccaagttcatgattgtattgcataatgcgattggtggccaagatacggataagttccctttcccattctttgaccgcaatgggaagtttgttcaggctctattgactgcaaacaagcgggttagcctcgagggaaaggttattggggctttctgtttcttgcaaatcccgagccctgagctgcagcaagctttagcagtccaacggaggcaggacacagagtgtttcacgaaggcaaaagagttggcttatatttgtcaggtgataaagaatcctttgagcggtatgcgtttcgcaaactcattgttggaggccacagacttgaacgaggaccagaagcagttacttgaaacaagtgtttcttgcgagaaacagatctcaaggatcgtcggggacatggatcttgaaagcattgaagacggttcatttgtgctaaagagggaagagtttttccttggaagtgtcataaacgcgattgtaagtcaagcgatgttcttattaagggacagaggtcttcagctgatccgtgacattcccgaagagatcaaatcaatagaggtttttggagaccagataaggattcaacagctcctggctgagtttctgctgagtataatccggtatgcaccatctcaagagtgggtggagatccatttaagccaactttcaaagcaaatggctgatggattcgccgccatccgcacagaattcagaatggcgtgtccaggtgaaggtctgcctccagagctagtccgagacatgttccatagcagcaggtggacaagccctgaaggtttaggtctaagcgtatgtcgaaagattttaaagctaatgaacggtgaggttcaatacatccgagaatcagaacggtcctatttcctcatcattctggaactccctgtacctcgaaagcgaccattgtcaactgctagtggaagtggtgacatgatgctgatgatgccatattagatggtttccggagtcgggggtagtggcggtggccgtggcggtggccgtggcggagaagaagaaccgtcgtcaagtcacactcctaataaccgaagaggaggagaacaagctcaatcgtcgggaacgaaatctctcagaccaagaagcaacactgaatcaatgagcaaagcaattcaacagtacaccgtcgacgcaagactccacgccgttttcgaacaatccggcgaatcagggaaatcattcgactactcacaatcactcaaaacgacgacgtacggttcctctgtacctgagcaacagatcacagcttatctctctcgaatccagcgaggtggttacattcagcctttcggatgtatgatcgccgtcgatgaatccagtttccggatcatcggttacagtgaaaacgccagagaaatgttagggattatgcctcaatctgttcctactcttgagaaacctgagattctagctatgggaactgatgtgagatctttgttcacttcttcgagctcgattctactcgagcgtgctttcgttgctcgagagattaccttgttaaatccggtttggatccattccaagaatactggtaaaccgttttacgccattcttcataggattgatgttggtgttgttattgatttagagccagctagaactgaagatcctgcgctttctattgctggtgctgttcaatcgcagaaactcgcggttcgtgcgatttctcagttacaggctcttcctggtggagatattaagcttttgtgtgacactgtcgtggaaagtgtgagggacttgactggttatgatcgtgttatggtttataagtttcatgaagatgagcatggagaagttgtagctgagagtaaacgagatgatttagagccttatattggactgcatgttcctgctactgatattcctcaagcgtcaaggttcttgtttaagcagaaccgtgtccgaatgatagtagattgcaatgccacacctgttcttgtggtccaggacgataggctaactcagtctatgtgcttggttggttctactcttagggctcctcatggttgtcactctcagtatatggctaacatgggatctattgcgtctttagcaatggcggttataatcaatggaaatgaagatgatgggagcaatgtagctagtggaagaagctcgatgaggctttggggtttggttgtttgccatcacacttcttctcgctgcataccgtttccgctaaggtatgcttgtgagtttttgatgcaggctttcggtttacagttaaacatggaattgcagttagctttgcaaatgtcagagaaacgcgttttgagaacgcagacactgttatgtgatatgcttctgcgtgactcgcctgctggaattgttacacagagtcccagtatcatggacttagtgaaatgtgacggtgcagcatttctttaccacgggaagtattacccgttgggtgttgctcctagtgaagttcagataaaagatgttgtggagtggttgcttgcgaatcatgcggattcaaccggattaagcactgatagtttaggcgatgcggggtatcccggtgcagctgcgttaggggatgctgtgtgcggtatggcagttgcatatatcacaaaaagagactttcttttttggtttcgatctcacactgcgaaagaaatcaaatggggaggcgctaagcatcatccggaggataaagatgatgggcaacgaatgcatcctcgttcgtcctttcaggcttttcttgaagttgttaagagccggagtcagccatgggaaactgcggaaatggatgcgattcactcgctccagcttattctgagagactcttttaaagaatctgaggcggctatgaactctaaagttgtggatggtgtggttcagccatgtagggatatggcgggggaacaggggattgatgagttaggtgcagttgcaagagagatggttaggctcattgagactgcaactgttcctatattcgctgtggatgccggaggctgcatcaatggatggaacgctaagattgcagagttgacaggtctctcagttgaagaagctatggggaagtctctggtttctgatttaatatacaaagagaatgaagcaactgtcaataagcttctttctcgtgctttgagaggggacgaggaaaagaatgtggaggttaagctgaaaactttcagccccgaactacaagggaaagcagtttttgtggttgtgaatgcttgttccagcaaggactacttgaacaacattgtcggcgtttgttttgttggacaagacgttactagtcagaaaatcgtaatggataagttcatcaacatacaaggagattacaaggctattgtacatagcccaaaccctctaatcccgccaatttttgctgctgacgagaacacgtgctgcctggaatggaacatggcgatggaaaagcttacgggttggtctcgcagtgaagtgattgggaaaatgattgtcggggaagtgtttgggagctgttgcatgctaaagggtcctgatgctttaaccaagttcatgattgtattgcataatgcgattggtggccaagatacggataagttccctttcccattctttgaccgcaatgggaagtttgttcaggctctattgactgcaaacaagcgggttagcctcgagggaaaggttattggggctttctgtttcttgcaaatcccgagccctgagctgcagcaagctttagcagtccaacggaggcaggacacagagtgtttcacgaaggcaaaagagttggcttatatttgtcaggtgataaagaatcctttgagcggtatgcgtttcgcaaactcattgttggaggccacagacttgaacgaggaccagaagcagttacttgaaacaagtgtttcttgcgagaaacagatctcaaggatcgtcggggacatggatcttgaaagcattgaagacggttcatttgtgctaaagagggaagagtttttccttggaagtgtcataaacgcgattgtaagtcaagcgatgttcttattaagggacagaggtcttcagctgatccgtgacattcccgaagagatcaaatcaatagaggtttttggagaccagataaggattcaacagctcctggctgagtttctgctgagtataatccggtatgcaccatctcaagagtgggtggagatccatttaagccaactttcaaagcaaatggctgatggattcgccgccatccgcacagaattcagaatggcgtgtccaggtgaaggtctgcctccagagctagtccgagacatgttccatagcagcaggtggacaagccctgaaggtttaggtctaagcgtatgtcgaaagattttaaagctaatgaacggtgaggttcaatacatccgagaatcagaacggtcctatttcctcatcattctggaactccctgtacctcgaaagcgaccattgtcaactgctagtggaagtggtgacatgatgctgatgatgccatattagatggtttccggagtcgggggtagtggcggtggccgtggcggtggccgtggcggagaagaagaaccgtcgtcaagtcacactcctaataaccgaagaggaggagaacaagctcaatcgtcgggaacgaaatctctcagaccaagaagcaacactgaatcaatgagcaaagcaattcaacagtacaccgtcgacgcaagactccacgccgttttcgaacaatccggcgaatcagggaaatcattcgactactcacaatcactcaaaacgacgacgtacggttcctctgtacctgagcaacagatcacagcttatctctctcgaatccagcgaggtggttacattcagcctttcggatgtatgatcgccgtcgatgaatccagtttccggatcatcggttacagtgaaaacgccagagaaatgttagggattatgcctcaatctgttcctactcttgagaaacctgagattctagctatgggaactgatgtgagatctttgttcacttcttcgagctcgattctactcgagcgtgctttcgttgctcgagagattaccttgttaaatccggtttggatccattccaagaatactggtaaaccgttttacgccattcttcataggattgatgttggtgttgttattgatttagagccagctagaactgaagatcctgcgctttctattgctggtgctgttcaatcgcagaaactcgcggttcgtgcgatttctcagttacaggctcttcctggtggagatattaagcttttgtgtgacactgtcgtggaaagtgtgagggacttgactggttatgatcgtgttatggtttataagtttcatgaagatgagcatggagaagttgtagctgagagtaaacgagatgatttagagccttatattggactgcatgttcctgctactgatattcctcaagcgtcaaggttcttgtttaagcagaaccgtgtccgaatgatagtagattgcaatgccacacctgttcttgtggtccaggacgataggctaactcagtctatgtgcttggttggttctactcttagggctcctcatggttgtcactctcagtatatggctaacatgggatctattgcgtctttagcaatggcggttataatcaatggaaatgaagatgatgggagcaatgtagctagtggaagaagctcgatgaggctttggggtttggttgtttgccatcacacttcttctcgctgcataccgtttccgctaaggtatgcttgtgagtttttgatgcaggctttcggtttacagttaaacatggaattgcagttagctttgcaaatgtcagagaaacgcgttttgagaacgcagacactgttatgtgatatgcttctgcgtgactcgcctgctggaattgttacacagagtcccagtatcatggacttagtgaaatgtgacggtgcagcatttctttaccacgggaagtattacccgttgggtgttgctcctagtgaagttcagataaaagatgttgtggagtggttgcttgcgaatcatgcggattcaaccggattaagcactgatagtttaggcgatgcggggtatcccggtgcagctgcgttaggggatgctgtgtgcggtatggcagttgcatatatcacaaaaagagactttcttttttggtttcgatctcacactgcgaaagaaatcaaatggggaggcgctaagcatcatccggaggataaagatgatgggcaacgaatgcatcctcgttcgtcctttcaggcttttcttgaagttgttaagagccggagtcagccatgggaaactgcggaaatggatgcgattcactcgctccagcttattctgagagactcttttaaagaatctgaggcggctatgaactctaaagttgtggatggtgtggttcagccatgtagggatatggcgggggaacaggggattgatgagttaggtgcagttgcaagagagatggttaggctcattgagactgcaactgttcctatattcgctgtggatgccggaggctgcatcaatggatggaacgctaagattgcagagttgacaggtctctcagttgaagaagctatggggaagtctctggtttctgatttaatatacaaagagaatgaagcaactgtcaataagcttctttctcgtgctttgagaggggacgaggaaaagaatgtggaggttaagctgaaaactttcagccccgaactacaagggaaagcagtttttgtggttgtgaatgcttgttccagcaaggactacttgaacaacattgtcggcgtttgttttgttggacaagacgttactagtcagaaaatcgtaatggataagttcatcaacatacaaggagattacaaggctattgtacatagcccaaaccctctaatcccgccaatttttgctgctgacgagaacacgtgctgcctggaatggaacatggcgatggaaaagcttacgggttggtctcgcagtgaagtgattgggaaaatgattgtcggggaagtgtttgggagctgttgcatgctaaagggtcctgatgctttaaccaagttcatgattgtattgcataatgcgattggtggccaagatacggataagttccctttcccattctttgaccgcaatgggaagtttgttcaggctctattgactgcaaacaagcgggttagcctcgagggaaaggttattggggctttctgtttcttgcaaatcccgagccctgagctgcagcaagctttagcagtccaacggaggcaggacacagagtgtttcacgaaggcaaaagagttggcttatatttgtcaggtgataaagaatcctttgagcggtatgcgtttcgcaaactcattgttggaggccacagacttgaacgaggaccagaagcagttacttgaaacaagtgtttcttgcgagaaacagatctcaaggatcgtcggggacatggatcttgaaagcattgaagacggttcatttgtgctaaagagggaagagtttttccttggaagtgtcataaacgcgattgtaagtcaagcgatgttcttattaagggacagaggtcttcagctgatccgtgacattcccgaagagatcaaatcaatagaggtttttggagaccagataaggattcaacagctcctggctgagtttctgctgagtataatccggtatgcaccatctcaagagtgggtggagatccatttaagccaactttcaaagcaaatggctgatggattcgccgccatccgcacagaattcagaatggcgtgtccaggtgaaggtctgcctccagagctagtccgagacatgttccatagcagcaggtggacaagccctgaaggtttaggtctaagcgtatgtcgaaagattttaaagctaatgaacggtgaggttcaatacatccgagaatcagaacggtcctatttcctcatcattctggaactccctgtacctcgaaagcgaccattgtcaactgctagtggaagtggtgacatgatgctgatgatgccatattagatggtttccggagtcgggggtagtggcggtggccgtggcggtggccgtggcggagaagaagaaccgtcgtcaagtcacactcctaataaccgaagaggaggagaacaagctcaatcgtcgggaacgaaatctctcagaccaagaagcaacactgaatcaatgagcaaagcaattcaacagtacaccgtcgacgcaagactccacgccgttttcgaacaatccggcgaatcagggaaatcattcgactactcacaatcactcaaaacgacgacgtacggttcctctgtacctgagcaacagatcacagcttatctctctcgaatccagcgaggtggttacattcagcctttcggatgtatgatcgccgtcgatgaatccagtttccggatcatcggttacagtgaaaacgccagagaaatgttagggattatgcctcaatctgttcctactcttgagaaacctgagattctagctatgggaactgatgtgagatctttgttcacttcttcgagctcgattctactcgagcgtgctttcgttgctcgagagattaccttgttaaatccggtttggatccattccaagaatactggtaaaccgttttacgccattcttcataggattgatgttggtgttgttattgatttagagccagctagaactgaagatcctgcgctttctattgctggtgctgttcaatcgcagaaactcgcggttcgtgcgatttctcagttacaggctcttcctggtggagatattaagcttttgtgtgacactgtcgtggaaagtgtgagggacttgactggttatgatcgtgttatggtttataagtttcatgaagatgagcatggagaagttgtagctgagagtaaacgagatgatttagagccttatattggactgcatgttcctgctactgatattcctcaagcgtcaaggttcttgtttaagcagaaccgtgtccgaatgatagtagattgcaatgccacacctgttcttgtggtccaggacgataggctaactcagtctatgtgcttggttggttctactcttagggctcctcatggttgtcactctcagtatatggctaacatgggatctattgcgtctttagcaatggcggttataatcaatggaaatgaagatgatgggagcaatgtagctagtggaagaagctcgatgaggctttggggtttggttgtttgccatcacacttcttctcgctgcataccgtttccgctaaggtatgcttgtgagtttttgatgcaggctttcggtttacagttaaacatggaattgcagttagctttgcaaatgtcagagaaacgcgttttgagaacgcagacactgttatgtgatatgcttctgcgtgactcgcctgctggaattgttacacagagtcccagtatcatggacttagtgaaatgtgacggtgcagcatttctttaccacgggaagtattacccgttgggtgttgctcctagtgaagttcagataaaagatgttgtggagtggttgcttgcgaatcatgcggattcaaccggattaagcactgatagtttaggcgatgcggggtatcccggtgcagctgcgttaggggatgctgtgtgcggtatggcagttgcatatatcacaaaaagagactttcttttttggtttcgatctcacactgcgaaagaaatcaaatggggaggcgctaagcatcatccggaggataaagatgatgggcaacgaatgcatcctcgttcgtcctttcaggcttttcttgaagttgttaagagccggagtcagccatgggaaactgcggaaatggatgcgattcactcgctccagcttattctgagagactcttttaaagaatctgaggcggctatgaactctaaagttgtggatggtgtggttcagccatgtagggatatggcgggggaacaggggattgatgagttaggtgcagttgcaagagagatggttaggctcattgagactgcaactgttcctatattcgctgtggatgccggaggctgcatcaatggatggaacgctaagattgcagagttgacaggtctctcagttgaagaagctatggggaagtctctggtttctgatttaatatacaaagagaatgaagcaactgtcaataagcttctttctcgtgctttgagaggggacgaggaaaagaatgtggaggttaagctgaaaactttcagccccgaactacaagggaaagcagtttttgtggttgtgaatgcttgttccagcaaggactacttgaacaacattgtcggcgtttgttttgttggacaagacgttactagtcagaaaatcgtaatggataagttcatcaacatacaaggagattacaaggctattgtacatagcccaaaccctctaatcccgccaatttttgctgctgacgagaacacgtgctgcctggaatggaacatggcgatggaaaagcttacgggttggtctcgcagtgaagtgattgggaaaatgattgtcggggaagtgtttgggagctgttgcatgctaaagggtcctgatgctttaaccaagttcatgattgtattgcataatgcgattggtggccaagatacggataagttccctttcccattctttgaccgcaatgggaagtttgttcaggctctattgactgcaaacaagcgggttagcctcgagggaaaggttattggggctttctgtttcttgcaaatcccgagccctgagctgcagcaagctttagcagtccaacggaggcaggacacagagtgtttcacgaaggcaaaagagttggcttatatttgtcaggtgataaagaatcctttgagcggtatgcgtttcgcaaactcattgttggaggccacagacttgaacgaggaccagaagcagttacttgaaacaagtgtttcttgcgagaaacagatctcaaggatcgtcggggacatggatcttgaaagcattgaagacggttcatttgtgctaaagagggaagagtttttccttggaagtgtcataaacgcgattgtaagtcaagcgatgttcttattaagggacagaggtcttcagctgatccgtgacattcccgaagagatcaaatcaatagaggtttttggagaccagataaggattcaacagctcctggctgagtttctgctgagtataatccggtatgcaccatctcaagagtgggtggagatccatttaagccaactttcaaagcaaatggctgatggattcgccgccatccgcacagaattcagaatggcgtgtccaggtgaaggtctgcctccagagctagtccgagacatgttccatagcagcaggtggacaagccctgaaggtttaggtctaagcgtatgtcgaaagattttaaagctaatgaacggtgaggttcaatacatccgagaatcagaacggtcctatttcctcatcattctggaactccctgtacctcgaaagcgaccattgtcaactgctagtggaagtggtgacatgatgctgatgatgccatattagatggtttccggagtcgggggtagtggcggtggccgtggcggtggccgtggcggagaagaagaaccgtcgtcaagtcacactcctaataaccgaagaggaggagaacaagctcaatcgtcgggaacgaaatctctcagaccaagaagcaacactgaatcaatgagcaaagcaattcaacagtacaccgtcgacgcaagactccacgccgttttcgaacaatccggcgaatcagggaaatcattcgactactcacaatcactcaaaacgacgacgtacggttcctctgtacctgagcaacagatcacagcttatctctctcgaatccagcgaggtggttacattcagcctttcggatgtatgatcgccgtcgatgaatccagtttccggatcatcggttacagtgaaaacgccagagaaatgttagggattatgcctcaatctgttcctactcttgagaaacctgagattctagctatgggaactgatgtgagatctttgttcacttcttcgagctcgattctactcgagcgtgctttcgttgctcgagagattaccttgttaaatccggtttggatccattccaagaatactggtaaaccgttttacgccattcttcataggattgatgttggtgttgttattgatttagagccagctagaactgaagatcctgcgctttctattgctggtgctgttcaatcgcagaaactcgcggttcgtgcgatttctcagttacaggctcttcctggtggagatattaagcttttgtgtgacactgtcgtggaaagtgtgagggacttgactggttatgatcgtgttatggtttataagtttcatgaagatgagcatggagaagttgtagctgagagtaaacgagatgatttagagccttatattggactgcatgttcctgctactgatattcctcaagcgtcaaggttcttgtttaagcagaaccgtgtccgaatgatagtagattgcaatgccacacctgttcttgtggtccaggacgataggctaactcagtctatgtgcttggttggttctactcttagggctcctcatggttgtcactctcagtatatggctaacatgggatctattgcgtctttagcaatggcggttataatcaatggaaatgaagatgatgggagcaatgtagctagtggaagaagctcgatgaggctttggggtttggttgtttgccatcacacttcttctcgctgcataccgtttccgctaaggtatgcttgtgagtttttgatgcaggctttcggtttacagttaaacatggaattgcagttagctttgcaaatgtcagagaaacgcgttttgagaacgcagacactgttatgtgatatgcttctgcgtgactcgcctgctggaattgttacacagagtcccagtatcatggacttagtgaaatgtgacggtgcagcatttctttaccacgggaagtattacccgttgggtgttgctcctagtgaagttcagataaaagatgttgtggagtggttgcttgcgaatcatgcggattcaaccggattaagcactgatagtttaggcgatgcggggtatcccggtgcagctgcgttaggggatgctgtgtgcggtatggcagttgcatatatcacaaaaagagactttcttttttggtttcgatctcacactgcgaaagaaatcaaatggggaggcgctaagcatcatccggaggataaagatgatgggcaacgaatgcatcctcgttcgtcctttcaggcttttcttgaagttgttaagagccggagtcagccatgggaaactgcggaaatggatgcgattcactcgctccagcttattctgagagactcttttaaagaatctgaggcggctatgaactctaaagttgtggatggtgtggttcagccatgtagggatatggcgggggaacaggggattgatgagttaggtgcagttgcaagagagatggttaggctcattgagactgcaactgttcctatattcgctgtggatgccggaggctgcatcaatggatggaacgctaagattgcagagttgacaggtctctcagttgaagaagctatggggaagtctctggtttctgatttaatatacaaagagaatgaagcaactgtcaataagcttctttctcgtgctttgagaggggacgaggaaaagaatgtggaggttaagctgaaaactttcagccccgaactacaagggaaagcagtttttgtggttgtgaatgcttgttccagcaaggactacttgaacaacattgtcggcgtttgttttgttggacaagacgttactagtcagaaaatcgtaatggataagttcatcaacatacaaggagattacaaggctattgtacatagcccaaaccctctaatcccgccaatttttgctgctgacgagaacacgtgctgcctggaatggaacatggcgatggaaaagcttacgggttggtctcgcagtgaagtgattgggaaaatgattgtcggggaagtgtttgggagctgttgcatgctaaagggtcctgatgctttaaccaagttcatgattgtattgcataatgcgattggtggccaagatacggataagttccctttcccattctttgaccgcaatgggaagtttgttcaggctctattgactgcaaacaagcgggttagcctcgagggaaaggttattggggctttctgtttcttgcaaatcccgagccctgagctgcagcaagctttagcagtccaacggaggcaggacacagagtgtttcacgaaggcaaaagagttggcttatatttgtcaggtgataaagaatcctttgagcggtatgcgtttcgcaaactcattgttggaggccacagacttgaacgaggaccagaagcagttacttgaaacaagtgtttcttgcgagaaacagatctcaaggatcgtcggggacatggatcttgaaagcattgaagacggttcatttgtgctaaagagggaagagtttttccttggaagtgtcataaacgcgattgtaagtcaagcgatgttcttattaagggacagaggtcttcagctgatccgtgacattcccgaagagatcaaatcaatagaggtttttggagaccagataaggattcaacagctcctggctgagtttctgctgagtataatccggtatgcaccatctcaagagtgggtggagatccatttaagccaactttcaaagcaaatggctgatggattcgccgccatccgcacagaattcagaatggcgtgtccaggtgaaggtctgcctccagagctagtccgagacatgttccatagcagcaggtggacaagccctgaaggtttaggtctaagcgtatgtcgaaagattttaaagctaatgaacggtgaggttcaatacatccgagaatcagaacggtcctatttcctcatcattctggaactccctgtacctcgaaagcgaccattgtcaactgctagtggaagtggtgacatgatgctgatgatgccatattagatggtttccggagtcgggggtagtggcggtggccgtggcggtggccgtggcggagaagaagaaccgtcgtcaagtcacactcctaataaccgaagaggaggagaacaagctcaatcgtcgggaacgaaatctctcagaccaagaagcaacactgaatcaatgagcaaagcaattcaacagtacaccgtcgacgcaagactccacgccgttttcgaacaatccggcgaatcagggaaatcattcgactactcacaatcactcaaaacgacgacgtacggttcctctgtacctgagcaacagatcacagcttatctctctcgaatccagcgaggtggttacattcagcctttcggatgtatgatcgccgtcgatgaatccagtttccggatcatcggttacagtgaaaacgccagagaaatgttagggattatgcctcaatctgttcctactcttgagaaacctgagattctagctatgggaactgatgtgagatctttgttcacttcttcgagctcgattctactcgagcgtgctttcgttgctcgagagattaccttgttaaatccggtttggatccattccaagaatactggtaaaccgttttacgccattcttcataggattgatgttggtgttgttattgatttagagccagctagaactgaagatcctgcgctttctattgctggtgctgttcaatcgcagaaactcgcggttcgtgcgatttctcagttacaggctcttcctggtggagatattaagcttttgtgtgacactgtcgtggaaagtgtgagggacttgactggttatgatcgtgttatggtttataagtttcatgaagatgagcatggagaagttgtagctgagagtaaacgagatgatttagagccttatattggactgcatgttcctgctactgatattcctcaagcgtcaaggttcttgtttaagcagaaccgtgtccgaatgatagtagattgcaatgccacacctgttcttgtggtccaggacgataggctaactcagtctatgtgcttggttggttctactcttagggctcctcatggttgtcactctcagtatatggctaacatgggatctattgcgtctttagcaatggcggttataatcaatggaaatgaagatgatgggagcaatgtagctagtggaagaagctcgatgaggctttggggtttggttgtttgccatcacacttcttctcgctgcataccgtttccgctaaggtatgcttgtgagtttttgatgcaggctttcggtttacagttaaacatggaattgcagttagctttgcaaatgtcagagaaacgcgttttgagaacgcagacactgttatgtgatatgcttctgcgtgactcgcctgctggaattgttacacagagtcccagtatcatggacttagtgaaatgtgacggtgcagcatttctttaccacgggaagtattacccgttgggtgttgctcctagtgaagttcagataaaagatgttgtggagtggttgcttgcgaatcatgcggattcaaccggattaagcactgatagtttaggcgatgcggggtatcccggtgcagctgcgttaggggatgctgtgtgcggtatggcagttgcatatatcacaaaaagagactttcttttttggtttcgatctcacactgcgaaagaaatcaaatggggaggcgctaagcatcatccggaggataaagatgatgggcaacgaatgcatcctcgttcgtcctttcaggcttttcttgaagttgttaagagccggagtcagccatgggaaactgcggaaatggatgcgattcactcgctccagcttattctgagagactcttttaaagaatctgaggcggctatgaactctaaagttgtggatggtgtggttcagccatgtagggatatggcgggggaacaggggattgatgagttaggtgcagttgcaagagagatggttaggctcattgagactgcaactgttcctatattcgctgtggatgccggaggctgcatcaatggatggaacgctaagattgcagagttgacaggtctctcagttgaagaagctatggggaagtctctggtttctgatttaatatacaaagagaatgaagcaactgtcaataagcttctttctcgtgctttgagaggggacgaggaaaagaatgtggaggttaagctgaaaactttcagccccgaactacaagggaaagcagtttttgtggttgtgaatgcttgttccagcaaggactacttgaacaacattgtcggcgtttgttttgttggacaagacgttactagtcagaaaatcgtaatggataagttcatcaacatacaaggagattacaaggctattgtacatagcccaaaccctctaatcccgccaatttttgctgctgacgagaacacgtgctgcctggaatggaacatggcgatggaaaagcttacgggttggtctcgcagtgaagtgattgggaaaatgattgtcggggaagtgtttgggagctgttgcatgctaaagggtcctgatgctttaaccaagttcatgattgtattgcataatgcgattggtggccaagatacggataagttccctttcccattctttgaccgcaatgggaagtttgttcaggctctattgactgcaaacaagcgggttagcctcgagggaaaggttattggggctttctgtttcttgcaaatcccgagccctgagctgcagcaagctttagcagtccaacggaggcaggacacagagtgtttcacgaaggcaaaagagttggcttatatttgtcaggtgataaagaatcctttgagcggtatgcgtttcgcaaactcattgttggaggccacagacttgaacgaggaccagaagcagttacttgaaacaagtgtttcttgcgagaaacagatctcaaggatcgtcggggacatggatcttgaaagcattgaagacggttcatttgtgctaaagagggaagagtttttccttggaagtgtcataaacgcgattgtaagtcaagcgatgttcttattaagggacagaggtcttcagctgatccgtgacattcccgaagagatcaaatcaatagaggtttttggagaccagataaggattcaacagctcctggctgagtttctgctgagtataatccggtatgcaccatctcaagagtgggtggagatccatttaagccaactttcaaagcaaatggctgatggattcgccgccatccgcacagaattcagaatggcgtgtccaggtgaaggtctgcctccagagctagtccgagacatgttccatagcagcaggtggacaagccctgaaggtttaggtctaagcgtatgtcgaaagattttaaagctaatgaacggtgaggttcaatacatccgagaatcagaacggtcctatttcctcatcattctggaactccctgtacctcgaaagcgaccattgtcaactgctagtggaagtggtgacatgatgctgatgatgccatattagatggtttccggagtcgggggtagtggcggtggccgtggcggtggccgtggcggagaagaagaaccgtcgtcaagtcacactcctaataaccgaagaggaggagaacaagctcaatcgtcgggaacgaaatctctcagaccaagaagcaacactgaatcaatgagcaaagcaattcaacagtacaccgtcgacgcaagactccacgccgttttcgaacaatccggcgaatcagggaaatcattcgactactcacaatcactcaaaacgacgacgtacggttcctctgtacctgagcaacagatcacagcttatctctctcgaatccagcgaggtggttacattcagcctttcggatgtatgatcgccgtcgatgaatccagtttccggatcatcggttacagtgaaaacgccagagaaatgttagggattatgcctcaatctgttcctactcttgagaaacctgagattctagctatgggaactgatgtgagatctttgttcacttcttcgagctcgattctactcgagcgtgctttcgttgctcgagagattaccttgttaaatccggtttggatccattccaagaatactggtaaaccgttttacgccattcttcataggattgatgttggtgttgttattgatttagagccagctagaactgaagatcctgcgctttctattgctggtgctgttcaatcgcagaaactcgcggttcgtgcgatttctcagttacaggctcttcctggtggagatattaagcttttgtgtgacactgtcgtggaaagtgtgagggacttgactggttatgatcgtgttatggtttataagtttcatgaagatgagcatggagaagttgtagctgagagtaaacgagatgatttagagccttatattggactgcatgttcctgctactgatattcctcaagcgtcaaggttcttgtttaagcagaaccgtgtccgaatgatagtagattgcaatgccacacctgttcttgtggtccaggacgataggctaactcagtctatgtgcttggttggttctactcttagggctcctcatggttgtcactctcagtatatggctaacatgggatctattgcgtctttagcaatggcggttataatcaatggaaatgaagatgatgggagcaatgtagctagtggaagaagctcgatgaggctttggggtttggttgtttgccatcacacttcttctcgctgcataccgtttccgctaaggtatgcttgtgagtttttgatgcaggctttcggtttacagttaaacatggaattgcagttagctttgcaaatgtcagagaaacgcgttttgagaacgcagacactgttatgtgatatgcttctgcgtgactcgcctgctggaattgttacacagagtcccagtatcatggacttagtgaaatgtgacggtgcagcatttctttaccacgggaagtattacccgttgggtgttgctcctagtgaagttcagataaaagatgttgtggagtggttgcttgcgaatcatgcggattcaaccggattaagcactgatagtttaggcgatgcggggtatcccggtgcagctgcgttaggggatgctgtgtgcggtatggcagttgcatatatcacaaaaagagactttcttttttggtttcgatctcacactgcgaaagaaatcaaatggggaggcgctaagcatcatccggaggataaagatgatgggcaacgaatgcatcctcgttcgtcctttcaggcttttcttgaagttgttaagagccggagtcagccatgggaaactgcggaaatggatgcgattcactcgctccagcttattctgagagactcttttaaagaatctgaggcggctatgaactctaaagttgtggatggtgtggttcagccatgtagggatatggcgggggaacaggggattgatgagttaggtgcagttgcaagagagatggttaggctcattgagactgcaactgttcctatattcgctgtggatgccggaggctgcatcaatggatggaacgctaagattgcagagttgacaggtctctcagttgaagaagctatggggaagtctctggtttctgatttaatatacaaagagaatgaagcaactgtcaataagcttctttctcgtgctttgagaggggacgaggaaaagaatgtggaggttaagctgaaaactttcagccccgaactacaagggaaagcagtttttgtggttgtgaatgcttgttccagcaaggactacttgaacaacattgtcggcgtttgttttgttggacaagacgttactagtcagaaaatcgtaatggataagttcatcaacatacaaggagattacaaggctattgtacatagcccaaaccctctaatcccgccaatttttgctgctgacgagaacacgtgctgcctggaatggaacatggcgatggaaaagcttacgggttggtctcgcagtgaagtgattgggaaaatgattgtcggggaagtgtttgggagctgttgcatgctaaagggtcctgatgctttaaccaagttcatgattgtattgcataatgcgattggtggccaagatacggataagttccctttcccattctttgaccgcaatgggaagtttgttcaggctctattgactgcaaacaagcgggttagcctcgagggaaaggttattggggctttctgtttcttgcaaatcccgagccctgagctgcagcaagctttagcagtccaacggaggcaggacacagagtgtttcacgaaggcaaaagagttggcttatatttgtcaggtgataaagaatcctttgagcggtatgcgtttcgcaaactcattgttggaggccacagacttgaacgaggaccagaagcagttacttgaaacaagtgtttcttgcgagaaacagatctcaaggatcgtcggggacatggatcttgaaagcattgaagacggttcatttgtgctaaagagggaagagtttttccttggaagtgtcataaacgcgattgtaagtcaagcgatgttcttattaagggacagaggtcttcagctgatccgtgacattcccgaagagatcaaatcaatagaggtttttggagaccagataaggattcaacagctcctggctgagtttctgctgagtataatccggtatgcaccatctcaagagtgggtggagatccatttaagccaactttcaaagcaaatggctgatggattcgccgccatccgcacagaattcagaatggcgtgtccaggtgaaggtctgcctccagagctagtccgagacatgttccatagcagcaggtggacaagccctgaaggtttaggtctaagcgtatgtcgaaagattttaaagctaatgaacggtgaggttcaatacatccgagaatcagaacggtcctatttcctcatcattctggaactccctgtacctcgaaagcgaccattgtcaactgctagtggaagtggtgacatgatgctgatgatgccatattagatggtttccggagtcgggggtagtggcggtggccgtggcggtggccgtggcggagaagaagaaccgtcgtcaagtcacactcctaataaccgaagaggaggagaacaagctcaatcgtcgggaacgaaatctctcagaccaagaagcaacactgaatcaatgagcaaagcaattcaacagtacaccgtcgacgcaagactccacgccgttttcgaacaatccggcgaatcagggaaatcattcgactactcacaatcactcaaaacgacgacgtacggttcctctgtacctgagcaacagatcacagcttatctctctcgaatccagcgaggtggttacattcagcctttcggatgtatgatcgccgtcgatgaatccagtttccggatcatcggttacagtgaaaacgccagagaaatgttagggattatgcctcaatctgttcctactcttgagaaacctgagattctagctatgggaactgatgtgagatctttgttcacttcttcgagctcgattctactcgagcgtgctttcgttgctcgagagattaccttgttaaatccggtttggatccattccaagaatactggtaaaccgttttacgccattcttcataggattgatgttggtgttgttattgatttagagccagctagaactgaagatcctgcgctttctattgctggtgctgttcaatcgcagaaactcgcggttcgtgcgatttctcagttacaggctcttcctggtggagatattaagcttttgtgtgacactgtcgtggaaagtgtgagggacttgactggttatgatcgtgttatggtttataagtttcatgaagatgagcatggagaagttgtagctgagagtaaacgagatgatttagagccttatattggactgcatgttcctgctactgatattcctcaagcgtcaaggttcttgtttaagcagaaccgtgtccgaatgatagtagattgcaatgccacacctgttcttgtggtccaggacgataggctaactcagtctatgtgcttggttggttctactcttagggctcctcatggttgtcactctcagtatatggctaacatgggatctattgcgtctttagcaatggcggttataatcaatggaaatgaagatgatgggagcaatgtagctagtggaagaagctcgatgaggctttggggtttggttgtttgccatcacacttcttctcgctgcataccgtttccgctaaggtatgcttgtgagtttttgatgcaggctttcggtttacagttaaacatggaattgcagttagctttgcaaatgtcagagaaacgcgttttgagaacgcagacactgttatgtgatatgcttctgcgtgactcgcctgctggaattgttacacagagtcccagtatcatggacttagtgaaatgtgacggtgcagcatttctttaccacgggaagtattacccgttgggtgttgctcctagtgaagttcagataaaagatgttgtggagtggttgcttgcgaatcatgcggattcaaccggattaagcactgatagtttaggcgatgcggggtatcccggtgcagctgcgttaggggatgctgtgtgcggtatggcagttgcatatatcacaaaaagagactttcttttttggtttcgatctcacactgcgaaagaaatcaaatggggaggcgctaagcatcatccggaggataaagatgatgggcaacgaatgcatcctcgttcgtcctttcaggcttttcttgaagttgttaagagccggagtcagccatgggaaactgcggaaatggatgcgattcactcgctccagcttattctgagagactcttttaaagaatctgaggcggctatgaactctaaagttgtggatggtgtggttcagccatgtagggatatggcgggggaacaggggattgatgagttaggtgcagttgcaagagagatggttaggctcattgagactgcaactgttcctatattcgctgtggatgccggaggctgcatcaatggatggaacgctaagattgcagagttgacaggtctctcagttgaagaagctatggggaagtctctggtttctgatttaatatacaaagagaatgaagcaactgtcaataagcttctttctcgtgctttgagaggggacgaggaaaagaatgtggaggttaagctgaaaactttcagccccgaactacaagggaaagcagtttttgtggttgtgaatgcttgttccagcaaggactacttgaacaacattgtcggcgtttgttttgttggacaagacgttactagtcagaaaatcgtaatggataagttcatcaacatacaaggagattacaaggctattgtacatagcccaaaccctctaatcccgccaatttttgctgctgacgagaacacgtgctgcctggaatggaacatggcgatggaaaagcttacgggttggtctcgcagtgaagtgattgggaaaatgattgtcggggaagtgtttgggagctgttgcatgctaaagggtcctgatgctttaaccaagttcatgattgtattgcataatgcgattggtggccaagatacggataagttccctttcccattctttgaccgcaatgggaagtttgttcaggctctattgactgcaaacaagcgggttagcctcgagggaaaggttattggggctttctgtttcttgcaaatcccgagccctgagctgcagcaagctttagcagtccaacggaggcaggacacagagtgtttcacgaaggcaaaagagttggcttatatttgtcaggtgataaagaatcctttgagcggtatgcgtttcgcaaactcattgttggaggccacagacttgaacgaggaccagaagcagttacttgaaacaagtgtttcttgcgagaaacagatctcaaggatcgtcggggacatggatcttgaaagcattgaagacggttcatttgtgctaaagagggaagagtttttccttggaagtgtcataaacgcgattgtaagtcaagcgatgttcttattaagggacagaggtcttcagctgatccgtgacattcccgaagagatcaaatcaatagaggtttttggagaccagataaggattcaacagctcctggctgagtttctgctgagtataatccggtatgcaccatctcaagagtgggtggagatccatttaagccaactttcaaagcaaatggctgatggattcgccgccatccgcacagaattcagaatggcgtgtccaggtgaaggtctgcctccagagctagtccgagacatgttccatagcagcaggtggacaagccctgaaggtttaggtctaagcgtatgtcgaaagattttaaagctaatgaacggtgaggttcaatacatccgagaatcagaacggtcctatttcctcatcattctggaactccctgtacctcgaaagcgaccattgtcaactgctagtggaagtggtgacatgatgctgatgatgccatattagatggtttccggagtcgggggtagtggcggtggccgtggcggtggccgtggcggagaagaagaaccgtcgtcaagtcacactcctaataaccgaagaggaggagaacaagctcaatcgtcgggaacgaaatctctcagaccaagaagcaacactgaatcaatgagcaaagcaattcaacagtacaccgtcgacgcaagactccacgccgttttcgaacaatccggcgaatcagggaaatcattcgactactcacaatcactcaaaacgacgacgtacggttcctctgtacctgagcaacagatcacagcttatctctctcgaatccagcgaggtggttacattcagcctttcggatgtatgatcgccgtcgatgaatccagtttccggatcatcggttacagtgaaaacgccagagaaatgttagggattatgcctcaatctgttcctactcttgagaaacctgagattctagctatgggaactgatgtgagatctttgttcacttcttcgagctcgattctactcgagcgtgctttcgttgctcgagagattaccttgttaaatccggtttggatccattccaagaatactggtaaaccgttttacgccattcttcataggattgatgttggtgttgttattgatttagagccagctagaactgaagatcctgcgctttctattgctggtgctgttcaatcgcagaaactcgcggttcgtgcgatttctcagttacaggctcttcctggtggagatattaagcttttgtgtgacactgtcgtggaaagtgtgagggacttgactggttatgatcgtgttatggtttataagtttcatgaagatgagcatggagaagttgtagctgagagtaaacgagatgatttagagccttatattggactgcatgttcctgctactgatattcctcaagcgtcaaggttcttgtttaagcagaaccgtgtccgaatgatagtagattgcaatgccacacctgttcttgtggtccaggacgataggctaactcagtctatgtgcttggttggttctactcttagggctcctcatggttgtcactctcagtatatggctaacatgggatctattgcgtctttagcaatggcggttataatcaatggaaatgaagatgatgggagcaatgtagctagtggaagaagctcgatgaggctttggggtttggttgtttgccatcacacttcttctcgctgcataccgtttccgctaaggtatgcttgtgagtttttgatgcaggctttcggtttacagttaaacatggaattgcagttagctttgcaaatgtcagagaaacgcgttttgagaacgcagacactgttatgtgatatgcttctgcgtgactcgcctgctggaattgttacacagagtcccagtatcatggacttagtgaaatgtgacggtgcagcatttctttaccacgggaagtattacccgttgggtgttgctcctagtgaagttcagataaaagatgttgtggagtggttgcttgcgaatcatgcggattcaaccggattaagcactgatagtttaggcgatgcggggtatcccggtgcagctgcgttaggggatgctgtgtgcggtatggcagttgcatatatcacaaaaagagactttcttttttggtttcgatctcacactgcgaaagaaatcaaatggggaggcgctaagcatcatccggaggataaagatgatgggcaacgaatgcatcctcgttcgtcctttcaggcttttcttgaagttgttaagagccggagtcagccatgggaaactgcggaaatggatgcgattcactcgctccagcttattctgagagactcttttaaagaatctgaggcggctatgaactctaaagttgtggatggtgtggttcagccatgtagggatatggcgggggaacaggggattgatgagttaggtgcagttgcaagagagatggttaggctcattgagactgcaactgttcctatattcgctgtggatgccggaggctgcatcaatggatggaacgctaagattgcagagttgacaggtctctcagttgaagaagctatggggaagtctctggtttctgatttaatatacaaagagaatgaagcaactgtcaataagcttctttctcgtgctttgagaggggacgaggaaaagaatgtggaggttaagctgaaaactttcagccccgaactacaagggaaagcagtttttgtggttgtgaatgcttgttccagcaaggactacttgaacaacattgtcggcgtttgttttgttggacaagacgttactagtcagaaaatcgtaatggataagttcatcaacatacaaggagattacaaggctattgtacatagcccaaaccctctaatcccgccaatttttgctgctgacgagaacacgtgctgcctggaatggaacatggcgatggaaaagcttacgggttggtctcgcagtgaagtgattgggaaaatgattgtcggggaagtgtttgggagctgttgcatgctaaagggtcctgatgctttaaccaagttcatgattgtattgcataatgcgattggtggccaagatacggataagttccctttcccattctttgaccgcaatgggaagtttgttcaggctctattgactgcaaacaagcgggttagcctcgagggaaaggttattggggctttctgtttcttgcaaatcccgagccctgagctgcagcaagctttagcagtccaacggaggcaggacacagagtgtttcacgaaggcaaaagagttggcttatatttgtcaggtgataaagaatcctttgagcggtatgcgtttcgcaaactcattgttggaggccacagacttgaacgaggaccagaagcagttacttgaaacaagtgtttcttgcgagaaacagatctcaaggatcgtcggggacatggatcttgaaagcattgaagacggttcatttgtgctaaagagggaagagtttttccttggaagtgtcataaacgcgattgtaagtcaagcgatgttcttattaagggacagaggtcttcagctgatccgtgacattcccgaagagatcaaatcaatagaggtttttggagaccagataaggattcaacagctcctggctgagtttctgctgagtataatccggtatgcaccatctcaagagtgggtggagatccatttaagccaactttcaaagcaaatggctgatggattcgccgccatccgcacagaattcagaatggcgtgtccaggtgaaggtctgcctccagagctagtccgagacatgttccatagcagcaggtggacaagccctgaaggtttaggtctaagcgtatgtcgaaagattttaaagctaatgaacggtgaggttcaatacatccgagaatcagaacggtcctatttcctcatcattctggaactccctgtacctcgaaagcgaccattgtcaactgctagtggaagtggtgacatgatgctgatgatgccatattagatggtttccggagtcgggggtagtggcggtggccgtggcggtggccgtggcggagaagaagaaccgtcgtcaagtcacactcctaataaccgaagaggaggagaacaagctcaatcgtcgggaacgaaatctctcagaccaagaagcaacactgaatcaatgagcaaagcaattcaacagtacaccgtcgacgcaagactccacgccgttttcgaacaatccggcgaatcagggaaatcattcgactactcacaatcactcaaaacgacgacgtacggttcctctgtacctgagcaacagatcacagcttatctctctcgaatccagcgaggtggttacattcagcctttcggatgtatgatcgccgtcgatgaatccagtttccggatcatcggttacagtgaaaacgccagagaaatgttagggattatgcctcaatctgttcctactcttgagaaacctgagattctagctatgggaactgatgtgagatctttgttcacttcttcgagctcgattctactcgagcgtgctttcgttgctcgagagattaccttgttaaatccggtttggatccattccaagaatactggtaaaccgttttacgccattcttcataggattgatgttggtgttgttattgatttagagccagctagaactgaagatcctgcgctttctattgctggtgctgttcaatcgcagaaactcgcggttcgtgcgatttctcagttacaggctcttcctggtggagatattaagcttttgtgtgacactgtcgtggaaagtgtgagggacttgactggttatgatcgtgttatggtttataagtttcatgaagatgagcatggagaagttgtagctgagagtaaacgagatgatttagagccttatattggactgcatgttcctgctactgatattcctcaagcgtcaaggttcttgtttaagcagaaccgtgtccgaatgatagtagattgcaatgccacacctgttcttgtggtccaggacgataggctaactcagtctatgtgcttggttggttctactcttagggctcctcatggttgtcactctcagtatatggctaacatgggatctattgcgtctttagcaatggcggttataatcaatggaaatgaagatgatgggagcaatgtagctagtggaagaagctcgatgaggctttggggtttggttgtttgccatcacacttcttctcgctgcataccgtttccgctaaggtatgcttgtgagtttttgatgcaggctttcggtttacagttaaacatggaattgcagttagctttgcaaatgtcagagaaacgcgttttgagaacgcagacactgttatgtgatatgcttctgcgtgactcgcctgctggaattgttacacagagtcccagtatcatggacttagtgaaatgtgacggtgcagcatttctttaccacgggaagtattacccgttgggtgttgctcctagtgaagttcagataaaagatgttgtggagtggttgcttgcgaatcatgcggattcaaccggattaagcactgatagtttaggcgatgcggggtatcccggtgcagctgcgttaggggatgctgtgtgcggtatggcagttgcatatatcacaaaaagagactttcttttttggtttcgatctcacactgcgaaagaaatcaaatggggaggcgctaagcatcatccggaggataaagatgatgggcaacgaatgcatcctcgttcgtcctttcaggcttttcttgaagttgttaagagccggagtcagccatgggaaactgcggaaatggatgcgattcactcgctccagcttattctgagagactcttttaaagaatctgaggcggctatgaactctaaagttgtggatggtgtggttcagccatgtagggatatggcgggggaacaggggattgatgagttaggtgcagttgcaagagagatggttaggctcattgagactgcaactgttcctatattcgctgtggatgccggaggctgcatcaatggatggaacgctaagattgcagagttgacaggtctctcagttgaagaagctatggggaagtctctggtttctgatttaatatacaaagagaatgaagcaactgtcaataagcttctttctcgtgctttgagaggggacgaggaaaagaatgtggaggttaagctgaaaactttcagccccgaactacaagggaaagcagtttttgtggttgtgaatgcttgttccagcaaggactacttgaacaacattgtcggcgtttgttttgttggacaagacgttactagtcagaaaatcgtaatggataagttcatcaacatacaaggagattacaaggctattgtacatagcccaaaccctctaatcccgccaatttttgctgctgacgagaacacgtgctgcctggaatggaacatggcgatggaaaagcttacgggttggtctcgcagtgaagtgattgggaaaatgattgtcggggaagtgtttgggagctgttgcatgctaaagggtcctgatgctttaaccaagttcatgattgtattgcataatgcgattggtggccaagatacggataagttccctttcccattctttgaccgcaatgggaagtttgttcaggctctattgactgcaaacaagcgggttagcctcgagggaaaggttattggggctttctgtttcttgcaaatcccgagccctgagctgcagcaagctttagcagtccaacggaggcaggacacagagtgtttcacgaaggcaaaagagttggcttatatttgtcaggtgataaagaatcctttgagcggtatgcgtttcgcaaactcattgttggaggccacagacttgaacgaggaccagaagcagttacttgaaacaagtgtttcttgcgagaaacagatctcaaggatcgtcggggacatggatcttgaaagcattgaagacggttcatttgtgctaaagagggaagagtttttccttggaagtgtcataaacgcgattgtaagtcaagcgatgttcttattaagggacagaggtcttcagctgatccgtgacattcccgaagagatcaaatcaatagaggtttttggagaccagataaggattcaacagctcctggctgagtttctgctgagtataatccggtatgcaccatctcaagagtgggtggagatccatttaagccaactttcaaagcaaatggctgatggattcgccgccatccgcacagaattcagaatggcgtgtccaggtgaaggtctgcctccagagctagtccgagacatgttccatagcagcaggtggacaagccctgaaggtttaggtctaagcgtatgtcgaaagattttaaagctaatgaacggtgaggttcaatacatccgagaatcagaacggtcctatttcctcatcattctggaactccctgtacctcgaaagcgaccattgtcaactgctagtggaagtggtgacatgatgctgatgatgccatattagatggtttccggagtcgggggtagtggcggtggccgtggcggtggccgtggcggagaagaagaaccgtcgtcaagtcacactcctaataaccgaagaggaggagaacaagctcaatcgtcgggaacgaaatctctcagaccaagaagcaacactgaatcaatgagcaaagcaattcaacagtacaccgtcgacgcaagactccacgccgttttcgaacaatccggcgaatcagggaaatcattcgactactcacaatcactcaaaacgacgacgtacggttcctctgtacctgagcaacagatcacagcttatctctctcgaatccagcgaggtggttacattcagcctttcggatgtatgatcgccgtcgatgaatccagtttccggatcatcggttacagtgaaaacgccagagaaatgttagggattatgcctcaatctgttcctactcttgagaaacctgagattctagctatgggaactgatgtgagatctttgttcacttcttcgagctcgattctactcgagcgtgctttcgttgctcgagagattaccttgttaaatccggtttggatccattccaagaatactggtaaaccgttttacgccattcttcataggattgatgttggtgttgttattgatttagagccagctagaactgaagatcctgcgctttctattgctggtgctgttcaatcgcagaaactcgcggttcgtgcgatttctcagttacaggctcttcctggtggagatattaagcttttgtgtgacactgtcgtggaaagtgtgagggacttgactggttatgatcgtgttatggtttataagtttcatgaagatgagcatggagaagttgtagctgagagtaaacgagatgatttagagccttatattggactgcatgttcctgctactgatattcctcaagcgtcaaggttcttgtttaagcagaaccgtgtccgaatgatagtagattgcaatgccacacctgttcttgtggtccaggacgataggctaactcagtctatgtgcttggttggttctactcttagggctcctcatggttgtcactctcagtatatggctaacatgggatctattgcgtctttagcaatggcggttataatcaatggaaatgaagatgatgggagcaatgtagctagtggaagaagctcgatgaggctttggggtttggttgtttgccatcacacttcttctcgctgcataccgtttccgctaaggtatgcttgtgagtttttgatgcaggctttcggtttacagttaaacatggaattgcagttagctttgcaaatgtcagagaaacgcgttttgagaacgcagacactgttatgtgatatgcttctgcgtgactcgcctgctggaattgttacacagagtcccagtatcatggacttagtgaaatgtgacggtgcagcatttctttaccacgggaagtattacccgttgggtgttgctcctagtgaagttcagataaaagatgttgtggagtggttgcttgcgaatcatgcggattcaaccggattaagcactgatagtttaggcgatgcggggtatcccggtgcagctgcgttaggggatgctgtgtgcggtatggcagttgcatatatcacaaaaagagactttcttttttggtttcgatctcacactgcgaaagaaatcaaatggggaggcgctaagcatcatccggaggataaagatgatgggcaacgaatgcatcctcgttcgtcctttcaggcttttcttgaagttgttaagagccggagtcagccatgggaaactgcggaaatggatgcgattcactcgctccagcttattctgagagactcttttaaagaatctgaggcggctatgaactctaaagttgtggatggtgtggttcagccatgtagggatatggcgggggaacaggggattgatgagttaggtgcagttgcaagagagatggttaggctcattgagactgcaactgttcctatattcgctgtggatgccggaggctgcatcaatggatggaacgctaagattgcagagttgacaggtctctcagttgaagaagctatggggaagtctctggtttctgatttaatatacaaagagaatgaagcaactgtcaataagcttctttctcgtgctttgagaggggacgaggaaaagaatgtggaggttaagctgaaaactttcagccccgaactacaagggaaagcagtttttgtggttgtgaatgcttgttccagcaaggactacttgaacaacattgtcggcgtttgttttgttggacaagacgttactagtcagaaaatcgtaatggataagttcatcaacatacaaggagattacaaggctattgtacatagcccaaaccctctaatcccgccaatttttgctgctgacgagaacacgtgctgcctggaatggaacatggcgatggaaaagcttacgggttggtctcgcagtgaagtgattgggaaaatgattgtcggggaagtgtttgggagctgttgcatgctaaagggtcctgatgctttaaccaagttcatgattgtattgcataatgcgattggtggccaagatacggataagttccctttcccattctttgaccgcaatgggaagtttgttcaggctctattgactgcaaacaagcgggttagcctcgagggaaaggttattggggctttctgtttcttgcaaatcccgagccctgagctgcagcaagctttagcagtccaacggaggcaggacacagagtgtttcacgaaggcaaaagagttggcttatatttgtcaggtgataaagaatcctttgagcggtatgcgtttcgcaaactcattgttggaggccacagacttgaacgaggaccagaagcagttacttgaaacaagtgtttcttgcgagaaacagatctcaaggatcgtcggggacatggatcttgaaagcattgaagacggttcatttgtgctaaagagggaagagtttttccttggaagtgtcataaacgcgattgtaagtcaagcgatgttcttattaagggacagaggtcttcagctgatccgtgacattcccgaagagatcaaatcaatagaggtttttggagaccagataaggattcaacagctcctggctgagtttctgctgagtataatccggtatgcaccatctcaagagtgggtggagatccatttaagccaactttcaaagcaaatggctgatggattcgccgccatccgcacagaattcagaatggcgtgtccaggtgaaggtctgcctccagagctagtccgagacatgttccatagcagcaggtggacaagccctgaaggtttaggtctaagcgtatgtcgaaagattttaaagctaatgaacggtgaggttcaatacatccgagaatcagaacggtcctatttcctcatcattctggaactccctgtacctcgaaagcgaccattgtcaactgctagtggaagtggtgacatgatgctgatgatgccatattagatggtttccggagtcgggggtagtggcggtggccgtggcggtggccgtggcggagaagaagaaccgtcgtcaagtcacactcctaataaccgaagaggaggagaacaagctcaatcgtcgggaacgaaatctctcagaccaagaagcaacactgaatcaatgagcaaagcaattcaacagtacaccgtcgacgcaagactccacgccgttttcgaacaatccggcgaatcagggaaatcattcgactactcacaatcactcaaaacgacgacgtacggttcctctgtacctgagcaacagatcacagcttatctctctcgaatccagcgaggtggttacattcagcctttcggatgtatgatcgccgtcgatgaatccagtttccggatcatcggttacagtgaaaacgccagagaaatgttagggattatgcctcaatctgttcctactcttgagaaacctgagattctagctatgggaactgatgtgagatctttgttcacttcttcgagctcgattctactcgagcgtgctttcgttgctcgagagattaccttgttaaatccggtttggatccattccaagaatactggtaaaccgttttacgccattcttcataggattgatgttggtgttgttattgatttagagccagctagaactgaagatcctgcgctttctattgctggtgctgttcaatcgcagaaactcgcggttcgtgcgatttctcagttacaggctcttcctggtggagatattaagcttttgtgtgacactgtcgtggaaagtgtgagggacttgactggttatgatcgtgttatggtttataagtttcatgaagatgagcatggagaagttgtagctgagagtaaacgagatgatttagagccttatattggactgcatgttcctgctactgatattcctcaagcgtcaaggttcttgtttaagcagaaccgtgtccgaatgatagtagattgcaatgccacacctgttcttgtggtccaggacgataggctaactcagtctatgtgcttggttggttctactcttagggctcctcatggttgtcactctcagtatatggctaacatgggatctattgcgtctttagcaatggcggttataatcaatggaaatgaagatgatgggagcaatgtagctagtggaagaagctcgatgaggctttggggtttggttgtttgccatcacacttcttctcgctgcataccgtttccgctaaggtatgcttgtgagtttttgatgcaggctttcggtttacagttaaacatggaattgcagttagctttgcaaatgtcagagaaacgcgttttgagaacgcagacactgttatgtgatatgcttctgcgtgactcgcctgctggaattgttacacagagtcccagtatcatggacttagtgaaatgtgacggtgcagcatttctttaccacgggaagtattacccgttgggtgttgctcctagtgaagttcagataaaagatgttgtggagtggttgcttgcgaatcatgcggattcaaccggattaagcactgatagtttaggcgatgcggggtatcccggtgcagctgcgttaggggatgctgtgtgcggtatggcagttgcatatatcacaaaaagagactttcttttttggtttcgatctcacactgcgaaagaaatcaaatggggaggcgctaagcatcatccggaggataaagatgatgggcaacgaatgcatcctcgttcgtcctttcaggcttttcttgaagttgttaagagccggagtcagccatgggaaactgcggaaatggatgcgattcactcgctccagcttattctgagagactcttttaaagaatctgaggcggctatgaactctaaagttgtggatggtgtggttcagccatgtagggatatggcgggggaacaggggattgatgagttaggtgcagttgcaagagagatggttaggctcattgagactgcaactgttcctatattcgctgtggatgccggaggctgcatcaatggatggaacgctaagattgcagagttgacaggtctctcagttgaagaagctatggggaagtctctggtttctgatttaatatacaaagagaatgaagcaactgtcaataagcttctttctcgtgctttgagaggggacgaggaaaagaatgtggaggttaagctgaaaactttcagccccgaactacaagggaaagcagtttttgtggttgtgaatgcttgttccagcaaggactacttgaacaacattgtcggcgtttgttttgttggacaagacgttactagtcagaaaatcgtaatggataagttcatcaacatacaaggagattacaaggctattgtacatagcccaaaccctctaatcccgccaatttttgctgctgacgagaacacgtgctgcctggaatggaacatggcgatggaaaagcttacgggttggtctcgcagtgaagtgattgggaaaatgattgtcggggaagtgtttgggagctgttgcatgctaaagggtcctgatgctttaaccaagttcatgattgtattgcataatgcgattggtggccaagatacggataagttccctttcccattctttgaccgcaatgggaagtttgttcaggctctattgactgcaaacaagcgggttagcctcgagggaaaggttattggggctttctgtttcttgcaaatcccgagccctgagctgcagcaagctttagcagtccaacggaggcaggacacagagtgtttcacgaaggcaaaagagttggcttatatttgtcaggtgataaagaatcctttgagcggtatgcgtttcgcaaactcattgttggaggccacagacttgaacgaggaccagaagcagttacttgaaacaagtgtttcttgcgagaaacagatctcaaggatcgtcggggacatggatcttgaaagcattgaagacggttcatttgtgctaaagagggaagagtttttccttggaagtgtcataaacgcgattgtaagtcaagcgatgttcttattaagggacagaggtcttcagctgatccgtgacattcccgaagagatcaaatcaatagaggtttttggagaccagataaggattcaacagctcctggctgagtttctgctgagtataatccggtatgcaccatctcaagagtgggtggagatccatttaagccaactttcaaagcaaatggctgatggattcgccgccatccgcacagaattcagaatggcgtgtccaggtgaaggtctgcctccagagctagtccgagacatgttccatagcagcaggtggacaagccctgaaggtttaggtctaagcgtatgtcgaaagattttaaagctaatgaacggtgaggttcaatacatccgagaatcagaacggtcctatttcctcatcattctggaactccctgtacctcgaaagcgaccattgtcaactgctagtggaagtggtgacatgatgctgatgatgccatattagatggtttccggagtcgggggtagtggcggtggccgtggcggtggccgtggcggagaagaagaaccgtcgtcaagtcacactcctaataaccgaagaggaggagaacaagctcaatcgtcgggaacgaaatctctcagaccaagaagcaacactgaatcaatgagcaaagcaattcaacagtacaccgtcgacgcaagactccacgccgttttcgaacaatccggcgaatcagggaaatcattcgactactcacaatcactcaaaacgacgacgtacggttcctctgtacctgagcaacagatcacagcttatctctctcgaatccagcgaggtggttacattcagcctttcggatgtatgatcgccgtcgatgaatccagtttccggatcatcggttacagtgaaaacgccagagaaatgttagggattatgcctcaatctgttcctactcttgagaaacctgagattctagctatgggaactgatgtgagatctttgttcacttcttcgagctcgattctactcgagcgtgctttcgttgctcgagagattaccttgttaaatccggtttggatccattccaagaatactggtaaaccgttttacgccattcttcataggattgatgttggtgttgttattgatttagagccagctagaactgaagatcctgcgctttctattgctggtgctgttcaatcgcagaaactcgcggttcgtgcgatttctcagttacaggctcttcctggtggagatattaagcttttgtgtgacactgtcgtggaaagtgtgagggacttgactggttatgatcgtgttatggtttataagtttcatgaagatgagcatggagaagttgtagctgagagtaaacgagatgatttagagccttatattggactgcatgttcctgctactgatattcctcaagcgtcaaggttcttgtttaagcagaaccgtgtccgaatgatagtagattgcaatgccacacctgttcttgtggtccaggacgataggctaactcagtctatgtgcttggttggttctactcttagggctcctcatggttgtcactctcagtatatggctaacatgggatctattgcgtctttagcaatggcggttataatcaatggaaatgaagatgatgggagcaatgtagctagtggaagaagctcgatgaggctttggggtttggttgtttgccatcacacttcttctcgctgcataccgtttccgctaaggtatgcttgtgagtttttgatgcaggctttcggtttacagttaaacatggaattgcagttagctttgcaaatgtcagagaaacgcgttttgagaacgcagacactgttatgtgatatgcttctgcgtgactcgcctgctggaattgttacacagagtcccagtatcatggacttagtgaaatgtgacggtgcagcatttctttaccacgggaagtattacccgttgggtgttgctcctagtgaagttcagataaaagatgttgtggagtggttgcttgcgaatcatgcggattcaaccggattaagcactgatagtttaggcgatgcggggtatcccggtgcagctgcgttaggggatgctgtgtgcggtatggcagttgcatatatcacaaaaagagactttcttttttggtttcgatctcacactgcgaaagaaatcaaatggggaggcgctaagcatcatccggaggataaagatgatgggcaacgaatgcatcctcgttcgtcctttcaggcttttcttgaagttgttaagagccggagtcagccatgggaaactgcggaaatggatgcgattcactcgctccagcttattctgagagactcttttaaagaatctgaggcggctatgaactctaaagttgtggatggtgtggttcagccatgtagggatatggcgggggaacaggggattgatgagttaggtgcagttgcaagagagatggttaggctcattgagactgcaactgttcctatattcgctgtggatgccggaggctgcatcaatggatggaacgctaagattgcagagttgacaggtctctcagttgaagaagctatggggaagtctctggtttctgatttaatatacaaagagaatgaagcaactgtcaataagcttctttctcgtgctttgagaggggacgaggaaaagaatgtggaggttaagctgaaaactttcagccccgaactacaagggaaagcagtttttgtggttgtgaatgcttgttccagcaaggactacttgaacaacattgtcggcgtttgttttgttggacaagacgttactagtcagaaaatcgtaatggataagttcatcaacatacaaggagattacaaggctattgtacatagcccaaaccctctaatcccgccaatttttgctgctgacgagaacacgtgctgcctggaatggaacatggcgatggaaaagcttacgggttggtctcgcagtgaagtgattgggaaaatgattgtcggggaagtgtttgggagctgttgcatgctaaagggtcctgatgctttaaccaagttcatgattgtattgcataatgcgattggtggccaagatacggataagttccctttcccattctttgaccgcaatgggaagtttgttcaggctctattgactgcaaacaagcgggttagcctcgagggaaaggttattggggctttctgtttcttgcaaatcccgagccctgagctgcagcaagctttagcagtccaacggaggcaggacacagagtgtttcacgaaggcaaaagagttggcttatatttgtcaggtgataaagaatcctttgagcggtatgcgtttcgcaaactcattgttggaggccacagacttgaacgaggaccagaagcagttacttgaaacaagtgtttcttgcgagaaacagatctcaaggatcgtcggggacatggatcttgaaagcattgaagacggttcatttgtgctaaagagggaagagtttttccttggaagtgtcataaacgcgattgtaagtcaagcgatgttcttattaagggacagaggtcttcagctgatccgtgacattcccgaagagatcaaatcaatagaggtttttggagaccagataaggattcaacagctcctggctgagtttctgctgagtataatccggtatgcaccatctcaagagtgggtggagatccatttaagccaactttcaaagcaaatggctgatggattcgccgccatccgcacagaattcagaatggcgtgtccaggtgaaggtctgcctccagagctagtccgagacatgttccatagcagcaggtggacaagccctgaaggtttaggtctaagcgtatgtcgaaagattttaaagctaatgaacggtgaggttcaatacatccgagaatcagaacggtcctatttcctcatcattctggaactccctgtacctcgaaagcgaccattgtcaactgctagtggaagtggtgacatgatgctgatgatgccatattagatggtttccggagtcgggggtagtggcggtggccgtggcggtggccgtggcggagaagaagaaccgtcgtcaagtcacactcctaataaccgaagaggaggagaacaagctcaatcgtcgggaacgaaatctctcagaccaagaagcaacactgaatcaatgagcaaagcaattcaacagtacaccgtcgacgcaagactccacgccgttttcgaacaatccggcgaatcagggaaatcattcgactactcacaatcactcaaaacgacgacgtacggttcctctgtacctgagcaacagatcacagcttatctctctcgaatccagcgaggtggttacattcagcctttcggatgtatgatcgccgtcgatgaatccagtttccggatcatcggttacagtgaaaacgccagagaaatgttagggattatgcctcaatctgttcctactcttgagaaacctgagattctagctatgggaactgatgtgagatctttgttcacttcttcgagctcgattctactcgagcgtgctttcgttgctcgagagattaccttgttaaatccggtttggatccattccaagaatactggtaaaccgttttacgccattcttcataggattgatgttggtgttgttattgatttagagccagctagaactgaagatcctgcgctttctattgctggtgctgttcaatcgcagaaactcgcggttcgtgcgatttctcagttacaggctcttcctggtggagatattaagcttttgtgtgacactgtcgtggaaagtgtgagggacttgactggttatgatcgtgttatggtttataagtttcatgaagatgagcatggagaagttgtagctgagagtaaacgagatgatttagagccttatattggactgcatgttcctgctactgatattcctcaagcgtcaaggttcttgtttaagcagaaccgtgtccgaatgatagtagattgcaatgccacacctgttcttgtggtccaggacgataggctaactcagtctatgtgcttggttggttctactcttagggctcctcatggttgtcactctcagtatatggctaacatgggatctattgcgtctttagcaatggcggttataatcaatggaaatgaagatgatgggagcaatgtagctagtggaagaagctcgatgaggctttggggtttggttgtttgccatcacacttcttctcgctgcataccgtttccgctaaggtatgcttgtgagtttttgatgcaggctttcggtttacagttaaacatggaattgcagttagctttgcaaatgtcagagaaacgcgttttgagaacgcagacactgttatgtgatatgcttctgcgtgactcgcctgctggaattgttacacagagtcccagtatcatggacttagtgaaatgtgacggtgcagcatttctttaccacgggaagtattacccgttgggtgttgctcctagtgaagttcagataaaagatgttgtggagtggttgcttgcgaatcatgcggattcaaccggattaagcactgatagtttaggcgatgcggggtatcccggtgcagctgcgttaggggatgctgtgtgcggtatggcagttgcatatatcacaaaaagagactttcttttttggtttcgatctcacactgcgaaagaaatcaaatggggaggcgctaagcatcatccggaggataaagatgatgggcaacgaatgcatcctcgttcgtcctttcaggcttttcttgaagttgttaagagccggagtcagccatgggaaactgcggaaatggatgcgattcactcgctccagcttattctgagagactcttttaaagaatctgaggcggctatgaactctaaagttgtggatggtgtggttcagccatgtagggatatggcgggggaacaggggattgatgagttaggtgcagttgcaagagagatggttaggctcattgagactgcaactgttcctatattcgctgtggatgccggaggctgcatcaatggatggaacgctaagattgcagagttgacaggtctctcagttgaagaagctatggggaagtctctggtttctgatttaatatacaaagagaatgaagcaactgtcaataagcttctttctcgtgctttgagaggggacgaggaaaagaatgtggaggttaagctgaaaactttcagccccgaactacaagggaaagcagtttttgtggttgtgaatgcttgttccagcaaggactacttgaacaacattgtcggcgtttgttttgttggacaagacgttactagtcagaaaatcgtaatggataagttcatcaacatacaaggagattacaaggctattgtacatagcccaaaccctctaatcccgccaatttttgctgctgacgagaacacgtgctgcctggaatggaacatggcgatggaaaagcttacgggttggtctcgcagtgaagtgattgggaaaatgattgtcggggaagtgtttgggagctgttgcatgctaaagggtcctgatgctttaaccaagttcatgattgtattgcataatgcgattggtggccaagatacggataagttccctttcccattctttgaccgcaatgggaagtttgttcaggctctattgactgcaaacaagcgggttagcctcgagggaaaggttattggggctttctgtttcttgcaaatcccgagccctgagctgcagcaagctttagcagtccaacggaggcaggacacagagtgtttcacgaaggcaaaagagttggcttatatttgtcaggtgataaagaatcctttgagcggtatgcgtttcgcaaactcattgttggaggccacagacttgaacgaggaccagaagcagttacttgaaacaagtgtttcttgcgagaaacagatctcaaggatcgtcggggacatggatcttgaaagcattgaagacggttcatttgtgctaaagagggaagagtttttccttggaagtgtcataaacgcgattgtaagtcaagcgatgttcttattaagggacagaggtcttcagctgatccgtgacattcccgaagagatcaaatcaatagaggtttttggagaccagataaggattcaacagctcctggctgagtttctgctgagtataatccggtatgcaccatctcaagagtgggtggagatccatttaagccaactttcaaagcaaatggctgatggattcgccgccatccgcacagaattcagaatggcgtgtccaggtgaaggtctgcctccagagctagtccgagacatgttccatagcagcaggtggacaagccctgaaggtttaggtctaagcgtatgtcgaaagattttaaagctaatgaacggtgaggttcaatacatccgagaatcagaacggtcctatttcctcatcattctggaactccctgtacctcgaaagcgaccattgtcaactgctagtggaagtggtgacatgatgctgatgatgccatattagatggtttccggagtcgggggtagtggcggtggccgtggcggtggccgtggcggagaagaagaaccgtcgtcaagtcacactcctaataaccgaagaggaggagaacaagctcaatcgtcgggaacgaaatctctcagaccaagaagcaacactgaatcaatgagcaaagcaattcaacagtacaccgtcgacgcaagactccacgccgttttcgaacaatccggcgaatcagggaaatcattcgactactcacaatcactcaaaacgacgacgtacggttcctctgtacctgagcaacagatcacagcttatctctctcgaatccagcgaggtggttacattcagcctttcggatgtatgatcgccgtcgatgaatccagtttccggatcatcggttacagtgaaaacgccagagaaatgttagggattatgcctcaatctgttcctactcttgagaaacctgagattctagctatgggaactgatgtgagatctttgttcacttcttcgagctcgattctactcgagcgtgctttcgttgctcgagagattaccttgttaaatccggtttggatccattccaagaatactggtaaaccgttttacgccattcttcataggattgatgttggtgttgttattgatttagagccagctagaactgaagatcctgcgctttctattgctggtgctgttcaatcgcagaaactcgcggttcgtgcgatttctcagttacaggctcttcctggtggagatattaagcttttgtgtgacactgtcgtggaaagtgtgagggacttgactggttatgatcgtgttatggtttataagtttcatgaagatgagcatggagaagttgtagctgagagtaaacgagatgatttagagccttatattggactgcatgttcctgctactgatattcctcaagcgtcaaggttcttgtttaagcagaaccgtgtccgaatgatagtagattgcaatgccacacctgttcttgtggtccaggacgataggctaactcagtctatgtgcttggttggttctactcttagggctcctcatggttgtcactctcagtatatggctaacatgggatctattgcgtctttagcaatggcggttataatcaatggaaatgaagatgatgggagcaatgtagctagtggaagaagctcgatgaggctttggggtttggttgtttgccatcacacttcttctcgctgcataccgtttccgctaaggtatgcttgtgagtttttgatgcaggctttcggtttacagttaaacatggaattgcagttagctttgcaaatgtcagagaaacgcgttttgagaacgcagacactgttatgtgatatgcttctgcgtgactcgcctgctggaattgttacacagagtcccagtatcatggacttagtgaaatgtgacggtgcagcatttctttaccacgggaagtattacccgttgggtgttgctcctagtgaagttcagataaaagatgttgtggagtggttgcttgcgaatcatgcggattcaaccggattaagcactgatagtttaggcgatgcggggtatcccggtgcagctgcgttaggggatgctgtgtgcggtatggcagttgcatatatcacaaaaagagactttcttttttggtttcgatctcacactgcgaaagaaatcaaatggggaggcgctaagcatcatccggaggataaagatgatgggcaacgaatgcatcctcgttcgtcctttcaggcttttcttgaagttgttaagagccggagtcagccatgggaaactgcggaaatggatgcgattcactcgctccagcttattctgagagactcttttaaagaatctgaggcggctatgaactctaaagttgtggatggtgtggttcagccatgtagggatatggcgggggaacaggggattgatgagttaggtgcagttgcaagagagatggttaggctcattgagactgcaactgttcctatattcgctgtggatgccggaggctgcatcaatggatggaacgctaagattgcagagttgacaggtctctcagttgaagaagctatggggaagtctctggtttctgatttaatatacaaagagaatgaagcaactgtcaataagcttctttctcgtgctttgagaggggacgaggaaaagaatgtggaggttaagctgaaaactttcagccccgaactacaagggaaagcagtttttgtggttgtgaatgcttgttccagcaaggactacttgaacaacattgtcggcgtttgttttgttggacaagacgttactagtcagaaaatcgtaatggataagttcatcaacatacaaggagattacaaggctattgtacatagcccaaaccctctaatcccgccaatttttgctgctgacgagaacacgtgctgcctggaatggaacatggcgatggaaaagcttacgggttggtctcgcagtgaagtgattgggaaaatgattgtcggggaagtgtttgggagctgttgcatgctaaagggtcctgatgctttaaccaagttcatgattgtattgcataatgcgattggtggccaagatacggataagttccctttcccattctttgaccgcaatgggaagtttgttcaggctctattgactgcaaacaagcgggttagcctcgagggaaaggttattggggctttctgtttcttgcaaatcccgagccctgagctgcagcaagctttagcagtccaacggaggcaggacacagagtgtttcacgaaggcaaaagagttggcttatatttgtcaggtgataaagaatcctttgagcggtatgcgtttcgcaaactcattgttggaggccacagacttgaacgaggaccagaagcagttacttgaaacaagtgtttcttgcgagaaacagatctcaaggatcgtcggggacatggatcttgaaagcattgaagacggttcatttgtgctaaagagggaagagtttttccttggaagtgtcataaacgcgattgtaagtcaagcgatgttcttattaagggacagaggtcttcagctgatccgtgacattcccgaagagatcaaatcaatagaggtttttggagaccagataaggattcaacagctcctggctgagtttctgctgagtataatccggtatgcaccatctcaagagtgggtggagatccatttaagccaactttcaaagcaaatggctgatggattcgccgccatccgcacagaattcagaatggcgtgtccaggtgaaggtctgcctccagagctagtccgagacatgttccatagcagcaggtggacaagccctgaaggtttaggtctaagcgtatgtcgaaagattttaaagctaatgaacggtgaggttcaatacatccgagaatcagaacggtcctatttcctcatcattctggaactccctgtacctcgaaagcgaccattgtcaactgctagtggaagtggtgacatgatgctgatgatgccatattagatggtttccggagtcgggggtagtggcggtggccgtggcggtggccgtggcggagaagaagaaccgtcgtcaagtcacactcctaataaccgaagaggaggagaacaagctcaatcgtcgggaacgaaatctctcagaccaagaagcaacactgaatcaatgagcaaagcaattcaacagtacaccgtcgacgcaagactccacgccgttttcgaacaatccggcgaatcagggaaatcattcgactactcacaatcactcaaaacgacgacgtacggttcctctgtacctgagcaacagatcacagcttatctctctcgaatccagcgaggtggttacattcagcctttcggatgtatgatcgccgtcgatgaatccagtttccggatcatcggttacagtgaaaacgccagagaaatgttagggattatgcctcaatctgttcctactcttgagaaacctgagattctagctatgggaactgatgtgagatctttgttcacttcttcgagctcgattctactcgagcgtgctttcgttgctcgagagattaccttgttaaatccggtttggatccattccaagaatactggtaaaccgttttacgccattcttcataggattgatgttggtgttgttattgatttagagccagctagaactgaagatcctgcgctttctattgctggtgctgttcaatcgcagaaactcgcggttcgtgcgatttctcagttacaggctcttcctggtggagatattaagcttttgtgtgacactgtcgtggaaagtgtgagggacttgactggttatgatcgtgttatggtttataagtttcatgaagatgagcatggagaagttgtagctgagagtaaacgagatgatttagagccttatattggactgcatgttcctgctactgatattcctcaagcgtcaaggttcttgtttaagcagaaccgtgtccgaatgatagtagattgcaatgccacacctgttcttgtggtccaggacgataggctaactcagtctatgtgcttggttggttctactcttagggctcctcatggttgtcactctcagtatatggctaacatgggatctattgcgtctttagcaatggcggttataatcaatggaaatgaagatgatgggagcaatgtagctagtggaagaagctcgatgaggctttggggtttggttgtttgccatcacacttcttctcgctgcataccgtttccgctaaggtatgcttgtgagtttttgatgcaggctttcggtttacagttaaacatggaattgcagttagctttgcaaatgtcagagaaacgcgttttgagaacgcagacactgttatgtgatatgcttctgcgtgactcgcctgctggaattgttacacagagtcccagtatcatggacttagtgaaatgtgacggtgcagcatttctttaccacgggaagtattacccgttgggtgttgctcctagtgaagttcagataaaagatgttgtggagtggttgcttgcgaatcatgcggattcaaccggattaagcactgatagtttaggcgatgcggggtatcccggtgcagctgcgttaggggatgctgtgtgcggtatggcagttgcatatatcacaaaaagagactttcttttttggtttcgatctcacactgcgaaagaaatcaaatggggaggcgctaagcatcatccggaggataaagatgatgggcaacgaatgcatcctcgttcgtcctttcaggcttttcttgaagttgttaagagccggagtcagccatgggaaactgcggaaatggatgcgattcactcgctccagcttattctgagagactcttttaaagaatctgaggcggctatgaactctaaagttgtggatggtgtggttcagccatgtagggatatggcgggggaacaggggattgatgagttaggtgcagttgcaagagagatggttaggctcattgagactgcaactgttcctatattcgctgtggatgccggaggctgcatcaatggatggaacgctaagattgcagagttgacaggtctctcagttgaagaagctatggggaagtctctggtttctgatttaatatacaaagagaatgaagcaactgtcaataagcttctttctcgtgctttgagaggggacgaggaaaagaatgtggaggttaagctgaaaactttcagccccgaactacaagggaaagcagtttttgtggttgtgaatgcttgttccagcaaggactacttgaacaacattgtcggcgtttgttttgttggacaagacgttactagtcagaaaatcgtaatggataagttcatcaacatacaaggagattacaaggctattgtacatagcccaaaccctctaatcccgccaatttttgctgctgacgagaacacgtgctgcctggaatggaacatggcgatggaaaagcttacgggttggtctcgcagtgaagtgattgggaaaatgattgtcggggaagtgtttgggagctgttgcatgctaaagggtcctgatgctttaaccaagttcatgattgtattgcataatgcgattggtggccaagatacggataagttccctttcccattctttgaccgcaatgggaagtttgttcaggctctattgactgcaaacaagcgggttagcctcgagggaaaggttattggggctttctgtttcttgcaaatcccgagccctgagctgcagcaagctttagcagtccaacggaggcaggacacagagtgtttcacgaaggcaaaagagttggcttatatttgtcaggtgataaagaatcctttgagcggtatgcgtttcgcaaactcattgttggaggccacagacttgaacgaggaccagaagcagttacttgaaacaagtgtttcttgcgagaaacagatctcaaggatcgtcggggacatggatcttgaaagcattgaagacggttcatttgtgctaaagagggaagagtttttccttggaagtgtcataaacgcgattgtaagtcaagcgatgttcttattaagggacagaggtcttcagctgatccgtgacattcccgaagagatcaaatcaatagaggtttttggagaccagataaggattcaacagctcctggctgagtttctgctgagtataatccggtatgcaccatctcaagagtgggtggagatccatttaagccaactttcaaagcaaatggctgatggattcgccgccatccgcacagaattcagaatggcgtgtccaggtgaaggtctgcctccagagctagtccgagacatgttccatagcagcaggtggacaagccctgaaggtttaggtctaagcgtatgtcgaaagattttaaagctaatgaacggtgaggttcaatacatccgagaatcagaacggtcctatttcctcatcattctggaactccctgtacctcgaaagcgaccattgtcaactgctagtggaagtggtgacatgatgctgatgatgccatattagatggtttccggagtcgggggtagtggcggtggccgtggcggtggccgtggcggagaagaagaaccgtcgtcaagtcacactcctaataaccgaagaggaggagaacaagctcaatcgtcgggaacgaaatctctcagaccaagaagcaacactgaatcaatgagcaaagcaattcaacagtacaccgtcgacgcaagactccacgccgttttcgaacaatccggcgaatcagggaaatcattcgactactcacaatcactcaaaacgacgacgtacggttcctctgtacctgagcaacagatcacagcttatctctctcgaatccagcgaggtggttacattcagcctttcggatgtatgatcgccgtcgatgaatccagtttccggatcatcggttacagtgaaaacgccagagaaatgttagggattatgcctcaatctgttcctactcttgagaaacctgagattctagctatgggaactgatgtgagatctttgttcacttcttcgagctcgattctactcgagcgtgctttcgttgctcgagagattaccttgttaaatccggtttggatccattccaagaatactggtaaaccgttttacgccattcttcataggattgatgttggtgttgttattgatttagagccagctagaactgaagatcctgcgctttctattgctggtgctgttcaatcgcagaaactcgcggttcgtgcgatttctcagttacaggctcttcctggtggagatattaagcttttgtgtgacactgtcgtggaaagtgtgagggacttgactggttatgatcgtgttatggtttataagtttcatgaagatgagcatggagaagttgtagctgagagtaaacgagatgatttagagccttatattggactgcatgttcctgctactgatattcctcaagcgtcaaggttcttgtttaagcagaaccgtgtccgaatgatagtagattgcaatgccacacctgttcttgtggtccaggacgataggctaactcagtctatgtgcttggttggttctactcttagggctcctcatggttgtcactctcagtatatggctaacatgggatctattgcgtctttagcaatggcggttataatcaatggaaatgaagatgatgggagcaatgtagctagtggaagaagctcgatgaggctttggggtttggttgtttgccatcacacttcttctcgctgcataccgtttccgctaaggtatgcttgtgagtttttgatgcaggctttcggtttacagttaaacatggaattgcagttagctttgcaaatgtcagagaaacgcgttttgagaacgcagacactgttatgtgatatgcttctgcgtgactcgcctgctggaattgttacacagagtcccagtatcatggacttagtgaaatgtgacggtgcagcatttctttaccacgggaagtattacccgttgggtgttgctcctagtgaagttcagataaaagatgttgtggagtggttgcttgcgaatcatgcggattcaaccggattaagcactgatagtttaggcgatgcggggtatcccggtgcagctgcgttaggggatgctgtgtgcggtatggcagttgcatatatcacaaaaagagactttcttttttggtttcgatctcacactgcgaaagaaatcaaatggggaggcgctaagcatcatccggaggataaagatgatgggcaacgaatgcatcctcgttcgtcctttcaggcttttcttgaagttgttaagagccggagtcagccatgggaaactgcggaaatggatgcgattcactcgctccagcttattctgagagactcttttaaagaatctgaggcggctatgaactctaaagttgtggatggtgtggttcagccatgtagggatatggcgggggaacaggggattgatgagttaggtgcagttgcaagagagatggttaggctcattgagactgcaactgttcctatattcgctgtggatgccggaggctgcatcaatggatggaacgctaagattgcagagttgacaggtctctcagttgaagaagctatggggaagtctctggtttctgatttaatatacaaagagaatgaagcaactgtcaataagcttctttctcgtgctttgagaggggacgaggaaaagaatgtggaggttaagctgaaaactttcagccccgaactacaagggaaagcagtttttgtggttgtgaatgcttgttccagcaaggactacttgaacaacattgtcggcgtttgttttgttggacaagacgttactagtcagaaaatcgtaatggataagttcatcaacatacaaggagattacaaggctattgtacatagcccaaaccctctaatcccgccaatttttgctgctgacgagaacacgtgctgcctggaatggaacatggcgatggaaaagcttacgggttggtctcgcagtgaagtgattgggaaaatgattgtcggggaagtgtttgggagctgttgcatgctaaagggtcctgatgctttaaccaagttcatgattgtattgcataatgcgattggtggccaagatacggataagttccctttcccattctttgaccgcaatgggaagtttgttcaggctctattgactgcaaacaagcgggttagcctcgagggaaaggttattggggctttctgtttcttgcaaatcccgagccctgagctgcagcaagctttagcagtccaacggaggcaggacacagagtgtttcacgaaggcaaaagagttggcttatatttgtcaggtgataaagaatcctttgagcggtatgcgtttcgcaaactcattgttggaggccacagacttgaacgaggaccagaagcagttacttgaaacaagtgtttcttgcgagaaacagatctcaaggatcgtcggggacatggatcttgaaagcattgaagacggttcatttgtgctaaagagggaagagtttttccttggaagtgtcataaacgcgattgtaagtcaagcgatgttcttattaagggacagaggtcttcagctgatccgtgacattcccgaagagatcaaatcaatagaggtttttggagaccagataaggattcaacagctcctggctgagtttctgctgagtataatccggtatgcaccatctcaagagtgggtggagatccatttaagccaactttcaaagcaaatggctgatggattcgccgccatccgcacagaattcagaatggcgtgtccaggtgaaggtctgcctccagagctagtccgagacatgttccatagcagcaggtggacaagccctgaaggtttaggtctaagcgtatgtcgaaagattttaaagctaatgaacggtgaggttcaatacatccgagaatcagaacggtcctatttcctcatcattctggaactccctgtacctcgaaagcgaccattgtcaactgctagtggaagtggtgacatgatgctgatgatgccatattagatggtttccggagtcgggggtagtggcggtggccgtggcggtggccgtggcggagaagaagaaccgtcgtcaagtcacactcctaataaccgaagaggaggagaacaagctcaatcgtcgggaacgaaatctctcagaccaagaagcaacactgaatcaatgagcaaagcaattcaacagtacaccgtcgacgcaagactccacgccgttttcgaacaatccggcgaatcagggaaatcattcgactactcacaatcactcaaaacgacgacgtacggttcctctgtacctgagcaacagatcacagcttatctctctcgaatccagcgaggtggttacattcagcctttcggatgtatgatcgccgtcgatgaatccagtttccggatcatcggttacagtgaaaacgccagagaaatgttagggattatgcctcaatctgttcctactcttgagaaacctgagattctagctatgggaactgatgtgagatctttgttcacttcttcgagctcgattctactcgagcgtgctttcgttgctcgagagattaccttgttaaatccggtttggatccattccaagaatactggtaaaccgttttacgccattcttcataggattgatgttggtgttgttattgatttagagccagctagaactgaagatcctgcgctttctattgctggtgctgttcaatcgcagaaactcgcggttcgtgcgatttctcagttacaggctcttcctggtggagatattaagcttttgtgtgacactgtcgtggaaagtgtgagggacttgactggttatgatcgtgttatggtttataagtttcatgaagatgagcatggagaagttgtagctgagagtaaacgagatgatttagagccttatattggactgcatgttcctgctactgatattcctcaagcgtcaaggttcttgtttaagcagaaccgtgtccgaatgatagtagattgcaatgccacacctgttcttgtggtccaggacgataggctaactcagtctatgtgcttggttggttctactcttagggctcctcatggttgtcactctcagtatatggctaacatgggatctattgcgtctttagcaatggcggttataatcaatggaaatgaagatgatgggagcaatgtagctagtggaagaagctcgatgaggctttggggtttggttgtttgccatcacacttcttctcgctgcataccgtttccgctaaggtatgcttgtgagtttttgatgcaggctttcggtttacagttaaacatggaattgcagttagctttgcaaatgtcagagaaacgcgttttgagaacgcagacactgttatgtgatatgcttctgcgtgactcgcctgctggaattgttacacagagtcccagtatcatggacttagtgaaatgtgacggtgcagcatttctttaccacgggaagtattacccgttgggtgttgctcctagtgaagttcagataaaagatgttgtggagtggttgcttgcgaatcatgcggattcaaccggattaagcactgatagtttaggcgatgcggggtatcccggtgcagctgcgttaggggatgctgtgtgcggtatggcagttgcatatatcacaaaaagagactttcttttttggtttcgatctcacactgcgaaagaaatcaaatggggaggcgctaagcatcatccggaggataaagatgatgggcaacgaatgcatcctcgttcgtcctttcaggcttttcttgaagttgttaagagccggagtcagccatgggaaactgcggaaatggatgcgattcactcgctccagcttattctgagagactcttttaaagaatctgaggcggctatgaactctaaagttgtggatggtgtggttcagccatgtagggatatggcgggggaacaggggattgatgagttaggtgcagttgcaagagagatggttaggctcattgagactgcaactgttcctatattcgctgtggatgccggaggctgcatcaatggatggaacgctaagattgcagagttgacaggtctctcagttgaagaagctatggggaagtctctggtttctgatttaatatacaaagagaatgaagcaactgtcaataagcttctttctcgtgctttgagaggggacgaggaaaagaatgtggaggttaagctgaaaactttcagccccgaactacaagggaaagcagtttttgtggttgtgaatgcttgttccagcaaggactacttgaacaacattgtcggcgtttgttttgttggacaagacgttactagtcagaaaatcgtaatggataagttcatcaacatacaaggagattacaaggctattgtacatagcccaaaccctctaatcccgccaatttttgctgctgacgagaacacgtgctgcctggaatggaacatggcgatggaaaagcttacgggttggtctcgcagtgaagtgattgggaaaatgattgtcggggaagtgtttgggagctgttgcatgctaaagggtcctgatgctttaaccaagttcatgattgtattgcataatgcgattggtggccaagatacggataagttccctttcccattctttgaccgcaatgggaagtttgttcaggctctattgactgcaaacaagcgggttagcctcgagggaaaggttattggggctttctgtttcttgcaaatcccgagccctgagctgcagcaagctttagcagtccaacggaggcaggacacagagtgtttcacgaaggcaaaagagttggcttatatttgtcaggtgataaagaatcctttgagcggtatgcgtttcgcaaactcattgttggaggccacagacttgaacgaggaccagaagcagttacttgaaacaagtgtttcttgcgagaaacagatctcaaggatcgtcggggacatggatcttgaaagcattgaagacggttcatttgtgctaaagagggaagagtttttccttggaagtgtcataaacgcgattgtaagtcaagcgatgttcttattaagggacagaggtcttcagctgatccgtgacattcccgaagagatcaaatcaatagaggtttttggagaccagataaggattcaacagctcctggctgagtttctgctgagtataatccggtatgcaccatctcaagagtgggtggagatccatttaagccaactttcaaagcaaatggctgatggattcgccgccatccgcacagaattcagaatggcgtgtccaggtgaaggtctgcctccagagctagtccgagacatgttccatagcagcaggtggacaagccctgaaggtttaggtctaagcgtatgtcgaaagattttaaagctaatgaacggtgaggttcaatacatccgagaatcagaacggtcctatttcctcatcattctggaactccctgtacctcgaaagcgaccattgtcaactgctagtggaagtggtgacatgatgctgatgatgccatattagatggtttccggagtcgggggtagtggcggtggccgtggcggtggccgtggcggagaagaagaaccgtcgtcaagtcacactcctaataaccgaagaggaggagaacaagctcaatcgtcgggaacgaaatctctcagaccaagaagcaacactgaatcaatgagcaaagcaattcaacagtacaccgtcgacgcaagactccacgccgttttcgaacaatccggcgaatcagggaaatcattcgactactcacaatcactcaaaacgacgacgtacggttcctctgtacctgagcaacagatcacagcttatctctctcgaatccagcgaggtggttacattcagcctttcggatgtatgatcgccgtcgatgaatccagtttccggatcatcggttacagtgaaaacgccagagaaatgttagggattatgcctcaatctgttcctactcttgagaaacctgagattctagctatgggaactgatgtgagatctttgttcacttcttcgagctcgattctactcgagcgtgctttcgttgctcgagagattaccttgttaaatccggtttggatccattccaagaatactggtaaaccgttttacgccattcttcataggattgatgttggtgttgttattgatttagagccagctagaactgaagatcctgcgctttctattgctggtgctgttcaatcgcagaaactcgcggttcgtgcgatttctcagttacaggctcttcctggtggagatattaagcttttgtgtgacactgtcgtggaaagtgtgagggacttgactggttatgatcgtgttatggtttataagtttcatgaagatgagcatggagaagttgtagctgagagtaaacgagatgatttagagccttatattggactgcatgttcctgctactgatattcctcaagcgtcaaggttcttgtttaagcagaaccgtgtccgaatgatagtagattgcaatgccacacctgttcttgtggtccaggacgataggctaactcagtctatgtgcttggttggttctactcttagggctcctcatggttgtcactctcagtatatggctaacatgggatctattgcgtctttagcaatggcggttataatcaatggaaatgaagatgatgggagcaatgtagctagtggaagaagctcgatgaggctttggggtttggttgtttgccatcacacttcttctcgctgcataccgtttccgctaaggtatgcttgtgagtttttgatgcaggctttcggtttacagttaaacatggaattgcagttagctttgcaaatgtcagagaaacgcgttttgagaacgcagacactgttatgtgatatgcttctgcgtgactcgcctgctggaattgttacacagagtcccagtatcatggacttagtgaaatgtgacggtgcagcatttctttaccacgggaagtattacccgttgggtgttgctcctagtgaagttcagataaaagatgttgtggagtggttgcttgcgaatcatgcggattcaaccggattaagcactgatagtttaggcgatgcggggtatcccggtgcagctgcgttaggggatgctgtgtgcggtatggcagttgcatatatcacaaaaagagactttcttttttggtttcgatctcacactgcgaaagaaatcaaatggggaggcgctaagcatcatccggaggataaagatgatgggcaacgaatgcatcctcgttcgtcctttcaggcttttcttgaagttgttaagagccggagtcagccatgggaaactgcggaaatggatgcgattcactcgctccagcttattctgagagactcttttaaagaatctgaggcggctatgaactctaaagttgtggatggtgtggttcagccatgtagggatatggcgggggaacaggggattgatgagttaggtgcagttgcaagagagatggttaggctcattgagactgcaactgttcctatattcgctgtggatgccggaggctgcatcaatggatggaacgctaagattgcagagttgacaggtctctcagttgaagaagctatggggaagtctctggtttctgatttaatatacaaagagaatgaagcaactgtcaataagcttctttctcgtgctttgagaggggacgaggaaaagaatgtggaggttaagctgaaaactttcagccccgaactacaagggaaagcagtttttgtggttgtgaatgcttgttccagcaaggactacttgaacaacattgtcggcgtttgttttgttggacaagacgttactagtcagaaaatcgtaatggataagttcatcaacatacaaggagattacaaggctattgtacatagcccaaaccctctaatcccgccaatttttgctgctgacgagaacacgtgctgcctggaatggaacatggcgatggaaaagcttacgggttggtctcgcagtgaagtgattgggaaaatgattgtcggggaagtgtttgggagctgttgcatgctaaagggtcctgatgctttaaccaagttcatgattgtattgcataatgcgattggtggccaagatacggataagttccctttcccattctttgaccgcaatgggaagtttgttcaggctctattgactgcaaacaagcgggttagcctcgagggaaaggttattggggctttctgtttcttgcaaatcccgagccctgagctgcagcaagctttagcagtccaacggaggcaggacacagagtgtttcacgaaggcaaaagagttggcttatatttgtcaggtgataaagaatcctttgagcggtatgcgtttcgcaaactcattgttggaggccacagacttgaacgaggaccagaagcagttacttgaaacaagtgtttcttgcgagaaacagatctcaaggatcgtcggggacatggatcttgaaagcattgaagacggttcatttgtgctaaagagggaagagtttttccttggaagtgtcataaacgcgattgtaagtcaagcgatgttcttattaagggacagaggtcttcagctgatccgtgacattcccgaagagatcaaatcaatagaggtttttggagaccagataaggattcaacagctcctggctgagtttctgctgagtataatccggtatgcaccatctcaagagtgggtggagatccatttaagccaactttcaaagcaaatggctgatggattcgccgccatccgcacagaattcagaatggcgtgtccaggtgaaggtctgcctccagagctagtccgagacatgttccatagcagcaggtggacaagccctgaaggtttaggtctaagcgtatgtcgaaagattttaaagctaatgaacggtgaggttcaatacatccgagaatcagaacggtcctatttcctcatcattctggaactccctgtacctcgaaagcgaccattgtcaactgctagtggaagtggtgacatgatgctgatgatgccatattagatggtttccggagtcgggggtagtggcggtggccgtggcggtggccgtggcggagaagaagaaccgtcgtcaagtcacactcctaataaccgaagaggaggagaacaagctcaatcgtcgggaacgaaatctctcagaccaagaagcaacactgaatcaatgagcaaagcaattcaacagtacaccgtcgacgcaagactccacgccgttttcgaacaatccggcgaatcagggaaatcattcgactactcacaatcactcaaaacgacgacgtacggttcctctgtacctgagcaacagatcacagcttatctctctcgaatccagcgaggtggttacattcagcctttcggatgtatgatcgccgtcgatgaatccagtttccggatcatcggttacagtgaaaacgccagagaaatgttagggattatgcctcaatctgttcctactcttgagaaacctgagattctagctatgggaactgatgtgagatctttgttcacttcttcgagctcgattctactcgagcgtgctttcgttgctcgagagattaccttgttaaatccggtttggatccattccaagaatactggtaaaccgttttacgccattcttcataggattgatgttggtgttgttattgatttagagccagctagaactgaagatcctgcgctttctattgctggtgctgttcaatcgcagaaactcgcggttcgtgcgatttctcagttacaggctcttcctggtggagatattaagcttttgtgtgacactgtcgtggaaagtgtgagggacttgactggttatgatcgtgttatggtttataagtttcatgaagatgagcatggagaagttgtagctgagagtaaacgagatgatttagagccttatattggactgcatgttcctgctactgatattcctcaagcgtcaaggttcttgtttaagcagaaccgtgtccgaatgatagtagattgcaatgccacacctgttcttgtggtccaggacgataggctaactcagtctatgtgcttggttggttctactcttagggctcctcatggttgtcactctcagtatatggctaacatgggatctattgcgtctttagcaatggcggttataatcaatggaaatgaagatgatgggagcaatgtagctagtggaagaagctcgatgaggctttggggtttggttgtttgccatcacacttcttctcgctgcataccgtttccgctaaggtatgcttgtgagtttttgatgcaggctttcggtttacagttaaacatggaattgcagttagctttgcaaatgtcagagaaacgcgttttgagaacgcagacactgttatgtgatatgcttctgcgtgactcgcctgctggaattgttacacagagtcccagtatcatggacttagtgaaatgtgacggtgcagcatttctttaccacgggaagtattacccgttgggtgttgctcctagtgaagttcagataaaagatgttgtggagtggttgcttgcgaatcatgcggattcaaccggattaagcactgatagtttaggcgatgcggggtatcccggtgcagctgcgttaggggatgctgtgtgcggtatggcagttgcatatatcacaaaaagagactttcttttttggtttcgatctcacactgcgaaagaaatcaaatggggaggcgctaagcatcatccggaggataaagatgatgggcaacgaatgcatcctcgttcgtcctttcaggcttttcttgaagttgttaagagccggagtcagccatgggaaactgcggaaatggatgcgattcactcgctccagcttattctgagagactcttttaaagaatctgaggcggctatgaactctaaagttgtggatggtgtggttcagccatgtagggatatggcgggggaacaggggattgatgagttaggtgcagttgcaagagagatggttaggctcattgagactgcaactgttcctatattcgctgtggatgccggaggctgcatcaatggatggaacgctaagattgcagagttgacaggtctctcagttgaagaagctatggggaagtctctggtttctgatttaatatacaaagagaatgaagcaactgtcaataagcttctttctcgtgctttgagaggggacgaggaaaagaatgtggaggttaagctgaaaactttcagccccgaactacaagggaaagcagtttttgtggttgtgaatgcttgttccagcaaggactacttgaacaacattgtcggcgtttgttttgttggacaagacgttactagtcagaaaatcgtaatggataagttcatcaacatacaaggagattacaaggctattgtacatagcccaaaccctctaatcccgccaatttttgctgctgacgagaacacgtgctgcctggaatggaacatggcgatggaaaagcttacgggttggtctcgcagtgaagtgattgggaaaatgattgtcggggaagtgtttgggagctgttgcatgctaaagggtcctgatgctttaaccaagttcatgattgtattgcataatgcgattggtggccaagatacggataagttccctttcccattctttgaccgcaatgggaagtttgttcaggctctattgactgcaaacaagcgggttagcctcgagggaaaggttattggggctttctgtttcttgcaaatcccgagccctgagctgcagcaagctttagcagtccaacggaggcaggacacagagtgtttcacgaaggcaaaagagttggcttatatttgtcaggtgataaagaatcctttgagcggtatgcgtttcgcaaactcattgttggaggccacagacttgaacgaggaccagaagcagttacttgaaacaagtgtttcttgcgagaaacagatctcaaggatcgtcggggacatggatcttgaaagcattgaagacggttcatttgtgctaaagagggaagagtttttccttggaagtgtcataaacgcgattgtaagtcaagcgatgttcttattaagggacagaggtcttcagctgatccgtgacattcccgaagagatcaaatcaatagaggtttttggagaccagataaggattcaacagctcctggctgagtttctgctgagtataatccggtatgcaccatctcaagagtgggtggagatccatttaagccaactttcaaagcaaatggctgatggattcgccgccatccgcacagaattcagaatggcgtgtccaggtgaaggtctgcctccagagctagtccgagacatgttccatagcagcaggtggacaagccctgaaggtttaggtctaagcgtatgtcgaaagattttaaagctaatgaacggtgaggttcaatacatccgagaatcagaacggtcctatttcctcatcattctggaactccctgtacctcgaaagcgaccattgtcaactgctagtggaagtggtgacatgatgctgatgatgccatattagatggtttccggagtcgggggtagtggcggtggccgtggcggtggccgtggcggagaagaagaaccgtcgtcaagtcacactcctaataaccgaagaggaggagaacaagctcaatcgtcgggaacgaaatctctcagaccaagaagcaacactgaatcaatgagcaaagcaattcaacagtacaccgtcgacgcaagactccacgccgttttcgaacaatccggcgaatcagggaaatcattcgactactcacaatcactcaaaacgacgacgtacggttcctctgtacctgagcaacagatcacagcttatctctctcgaatccagcgaggtggttacattcagcctttcggatgtatgatcgccgtcgatgaatccagtttccggatcatcggttacagtgaaaacgccagagaaatgttagggattatgcctcaatctgttcctactcttgagaaacctgagattctagctatgggaactgatgtgagatctttgttcacttcttcgagctcgattctactcgagcgtgctttcgttgctcgagagattaccttgttaaatccggtttggatccattccaagaatactggtaaaccgttttacgccattcttcataggattgatgttggtgttgttattgatttagagccagctagaactgaagatcctgcgctttctattgctggtgctgttcaatcgcagaaactcgcggttcgtgcgatttctcagttacaggctcttcctggtggagatattaagcttttgtgtgacactgtcgtggaaagtgtgagggacttgactggttatgatcgtgttatggtttataagtttcatgaagatgagcatggagaagttgtagctgagagtaaacgagatgatttagagccttatattggactgcatgttcctgctactgatattcctcaagcgtcaaggttcttgtttaagcagaaccgtgtccgaatgatagtagattgcaatgccacacctgttcttgtggtccaggacgataggctaactcagtctatgtgcttggttggttctactcttagggctcctcatggttgtcactctcagtatatggctaacatgggatctattgcgtctttagcaatggcggttataatcaatggaaatgaagatgatgggagcaatgtagctagtggaagaagctcgatgaggctttggggtttggttgtttgccatcacacttcttctcgctgcataccgtttccgctaaggtatgcttgtgagtttttgatgcaggctttcggtttacagttaaacatggaattgcagttagctttgcaaatgtcagagaaacgcgttttgagaacgcagacactgttatgtgatatgcttctgcgtgactcgcctgctggaattgttacacagagtcccagtatcatggacttagtgaaatgtgacggtgcagcatttctttaccacgggaagtattacccgttgggtgttgctcctagtgaagttcagataaaagatgttgtggagtggttgcttgcgaatcatgcggattcaaccggattaagcactgatagtttaggcgatgcggggtatcccggtgcagctgcgttaggggatgctgtgtgcggtatggcagttgcatatatcacaaaaagagactttcttttttggtttcgatctcacactgcgaaagaaatcaaatggggaggcgctaagcatcatccggaggataaagatgatgggcaacgaatgcatcctcgttcgtcctttcaggcttttcttgaagttgttaagagccggagtcagccatgggaaactgcggaaatggatgcgattcactcgctccagcttattctgagagactcttttaaagaatctgaggcggctatgaactctaaagttgtggatggtgtggttcagccatgtagggatatggcgggggaacaggggattgatgagttaggtgcagttgcaagagagatggttaggctcattgagactgcaactgttcctatattcgctgtggatgccggaggctgcatcaatggatggaacgctaagattgcagagttgacaggtctctcagttgaagaagctatggggaagtctctggtttctgatttaatatacaaagagaatgaagcaactgtcaataagcttctttctcgtgctttgagaggggacgaggaaaagaatgtggaggttaagctgaaaactttcagccccgaactacaagggaaagcagtttttgtggttgtgaatgcttgttccagcaaggactacttgaacaacattgtcggcgtttgttttgttggacaagacgttactagtcagaaaatcgtaatggataagttcatcaacatacaaggagattacaaggctattgtacatagcccaaaccctctaatcccgccaatttttgctgctgacgagaacacgtgctgcctggaatggaacatggcgatggaaaagcttacgggttggtctcgcagtgaagtgattgggaaaatgattgtcggggaagtgtttgggagctgttgcatgctaaagggtcctgatgctttaaccaagttcatgattgtattgcataatgcgattggtggccaagatacggataagttccctttcccattctttgaccgcaatgggaagtttgttcaggctctattgactgcaaacaagcgggttagcctcgagggaaaggttattggggctttctgtttcttgcaaatcccgagccctgagctgcagcaagctttagcagtccaacggaggcaggacacagagtgtttcacgaaggcaaaagagttggcttatatttgtcaggtgataaagaatcctttgagcggtatgcgtttcgcaaactcattgttggaggccacagacttgaacgaggaccagaagcagttacttgaaacaagtgtttcttgcgagaaacagatctcaaggatcgtcggggacatggatcttgaaagcattgaagacggttcatttgtgctaaagagggaagagtttttccttggaagtgtcataaacgcgattgtaagtcaagcgatgttcttattaagggacagaggtcttcagctgatccgtgacattcccgaagagatcaaatcaatagaggtttttggagaccagataaggattcaacagctcctggctgagtttctgctgagtataatccggtatgcaccatctcaagagtgggtggagatccatttaagccaactttcaaagcaaatggctgatggattcgccgccatccgcacagaattcagaatggcgtgtccaggtgaaggtctgcctccagagctagtccgagacatgttccatagcagcaggtggacaagccctgaaggtttaggtctaagcgtatgtcgaaagattttaaagctaatgaacggtgaggttcaatacatccgagaatcagaacggtcctatttcctcatcattctggaactccctgtacctcgaaagcgaccattgtcaactgctagtggaagtggtgacatgatgctgatgatgccatattagatggtttccggagtcgggggtagtggcggtggccgtggcggtggccgtggcggagaagaagaaccgtcgtcaagtcacactcctaataaccgaagaggaggagaacaagctcaatcgtcgggaacgaaatctctcagaccaagaagcaacactgaatcaatgagcaaagcaattcaacagtacaccgtcgacgcaagactccacgccgttttcgaacaatccggcgaatcagggaaatcattcgactactcacaatcactcaaaacgacgacgtacggttcctctgtacctgagcaacagatcacagcttatctctctcgaatccagcgaggtggttacattcagcctttcggatgtatgatcgccgtcgatgaatccagtttccggatcatcggttacagtgaaaacgccagagaaatgttagggattatgcctcaatctgttcctactcttgagaaacctgagattctagctatgggaactgatgtgagatctttgttcacttcttcgagctcgattctactcgagcgtgctttcgttgctcgagagattaccttgttaaatccggtttggatccattccaagaatactggtaaaccgttttacgccattcttcataggattgatgttggtgttgttattgatttagagccagctagaactgaagatcctgcgctttctattgctggtgctgttcaatcgcagaaactcgcggttcgtgcgatttctcagttacaggctcttcctggtggagatattaagcttttgtgtgacactgtcgtggaaagtgtgagggacttgactggttatgatcgtgttatggtttataagtttcatgaagatgagcatggagaagttgtagctgagagtaaacgagatgatttagagccttatattggactgcatgttcctgctactgatattcctcaagcgtcaaggttcttgtttaagcagaaccgtgtccgaatgatagtagattgcaatgccacacctgttcttgtggtccaggacgataggctaactcagtctatgtgcttggttggttctactcttagggctcctcatggttgtcactctcagtatatggctaacatgggatctattgcgtctttagcaatggcggttataatcaatggaaatgaagatgatgggagcaatgtagctagtggaagaagctcgatgaggctttggggtttggttgtttgccatcacacttcttctcgctgcataccgtttccgctaaggtatgcttgtgagtttttgatgcaggctttcggtttacagttaaacatggaattgcagttagctttgcaaatgtcagagaaacgcgttttgagaacgcagacactgttatgtgatatgcttctgcgtgactcgcctgctggaattgttacacagagtcccagtatcatggacttagtgaaatgtgacggtgcagcatttctttaccacgggaagtattacccgttgggtgttgctcctagtgaagttcagataaaagatgttgtggagtggttgcttgcgaatcatgcggattcaaccggattaagcactgatagtttaggcgatgcggggtatcccggtgcagctgcgttaggggatgctgtgtgcggtatggcagttgcatatatcacaaaaagagactttcttttttggtttcgatctcacactgcgaaagaaatcaaatggggaggcgctaagcatcatccggaggataaagatgatgggcaacgaatgcatcctcgttcgtcctttcaggcttttcttgaagttgttaagagccggagtcagccatgggaaactgcggaaatggatgcgattcactcgctccagcttattctgagagactcttttaaagaatctgaggcggctatgaactctaaagttgtggatggtgtggttcagccatgtagggatatggcgggggaacaggggattgatgagttaggtgcagttgcaagagagatggttaggctcattgagactgcaactgttcctatattcgctgtggatgccggaggctgcatcaatggatggaacgctaagattgcagagttgacaggtctctcagttgaagaagctatggggaagtctctggtttctgatttaatatacaaagagaatgaagcaactgtcaataagcttctttctcgtgctttgagaggggacgaggaaaagaatgtggaggttaagctgaaaactttcagccccgaactacaagggaaagcagtttttgtggttgtgaatgcttgttccagcaaggactacttgaacaacattgtcggcgtttgttttgttggacaagacgttactagtcagaaaatcgtaatggataagttcatcaacatacaaggagattacaaggctattgtacatagcccaaaccctctaatcccgccaatttttgctgctgacgagaacacgtgctgcctggaatggaacatggcgatggaaaagcttacgggttggtctcgcagtgaagtgattgggaaaatgattgtcggggaagtgtttgggagctgttgcatgctaaagggtcctgatgctttaaccaagttcatgattgtattgcataatgcgattggtggccaagatacggataagttccctttcccattctttgaccgcaatgggaagtttgttcaggctctattgactgcaaacaagcgggttagcctcgagggaaaggttattggggctttctgtttcttgcaaatcccgagccctgagctgcagcaagctttagcagtccaacggaggcaggacacagagtgtttcacgaaggcaaaagagttggcttatatttgtcaggtgataaagaatcctttgagcggtatgcgtttcgcaaactcattgttggaggccacagacttgaacgaggaccagaagcagttacttgaaacaagtgtttcttgcgagaaacagatctcaaggatcgtcggggacatggatcttgaaagcattgaagacggttcatttgtgctaaagagggaagagtttttccttggaagtgtcataaacgcgattgtaagtcaagcgatgttcttattaagggacagaggtcttcagctgatccgtgacattcccgaagagatcaaatcaatagaggtttttggagaccagataaggattcaacagctcctggctgagtttctgctgagtataatccggtatgcaccatctcaagagtgggtggagatccatttaagccaactttcaaagcaaatggctgatggattcgccgccatccgcacagaattcagaatggcgtgtccaggtgaaggtctgcctccagagctagtccgagacatgttccatagcagcaggtggacaagccctgaaggtttaggtctaagcgtatgtcgaaagattttaaagctaatgaacggtgaggttcaatacatccgagaatcagaacggtcctatttcctcatcattctggaactccctgtacctcgaaagcgaccattgtcaactgctagtggaagtggtgacatgatgctgatgatgccatattagatggtttccggagtcgggggtagtggcggtggccgtggcggtggccgtggcggagaagaagaaccgtcgtcaagtcacactcctaataaccgaagaggaggagaacaagctcaatcgtcgggaacgaaatctctcagaccaagaagcaacactgaatcaatgagcaaagcaattcaacagtacaccgtcgacgcaagactccacgccgttttcgaacaatccggcgaatcagggaaatcattcgactactcacaatcactcaaaacgacgacgtacggttcctctgtacctgagcaacagatcacagcttatctctctcgaatccagcgaggtggttacattcagcctttcggatgtatgatcgccgtcgatgaatccagtttccggatcatcggttacagtgaaaacgccagagaaatgttagggattatgcctcaatctgttcctactcttgagaaacctgagattctagctatgggaactgatgtgagatctttgttcacttcttcgagctcgattctactcgagcgtgctttcgttgctcgagagattaccttgttaaatccggtttggatccattccaagaatactggtaaaccgttttacgccattcttcataggattgatgttggtgttgttattgatttagagccagctagaactgaagatcctgcgctttctattgctggtgctgttcaatcgcagaaactcgcggttcgtgcgatttctcagttacaggctcttcctggtggagatattaagcttttgtgtgacactgtcgtggaaagtgtgagggacttgactggttatgatcgtgttatggtttataagtttcatgaagatgagcatggagaagttgtagctgagagtaaacgagatgatttagagccttatattggactgcatgttcctgctactgatattcctcaagcgtcaaggttcttgtttaagcagaaccgtgtccgaatgatagtagattgcaatgccacacctgttcttgtggtccaggacgataggctaactcagtctatgtgcttggttggttctactcttagggctcctcatggttgtcactctcagtatatggctaacatgggatctattgcgtctttagcaatggcggttataatcaatggaaatgaagatgatgggagcaatgtagctagtggaagaagctcgatgaggctttggggtttggttgtttgccatcacacttcttctcgctgcataccgtttccgctaaggtatgcttgtgagtttttgatgcaggctttcggtttacagttaaacatggaattgcagttagctttgcaaatgtcagagaaacgcgttttgagaacgcagacactgttatgtgatatgcttctgcgtgactcgcctgctggaattgttacacagagtcccagtatcatggacttagtgaaatgtgacggtgcagcatttctttaccacgggaagtattacccgttgggtgttgctcctagtgaagttcagataaaagatgttgtggagtggttgcttgcgaatcatgcggattcaaccggattaagcactgatagtttaggcgatgcggggtatcccggtgcagctgcgttaggggatgctgtgtgcggtatggcagttgcatatatcacaaaaagagactttcttttttggtttcgatctcacactgcgaaagaaatcaaatggggaggcgctaagcatcatccggaggataaagatgatgggcaacgaatgcatcctcgttcgtcctttcaggcttttcttgaagttgttaagagccggagtcagccatgggaaactgcggaaatggatgcgattcactcgctccagcttattctgagagactcttttaaagaatctgaggcggctatgaactctaaagttgtggatggtgtggttcagccatgtagggatatggcgggggaacaggggattgatgagttaggtgcagttgcaagagagatggttaggctcattgagactgcaactgttcctatattcgctgtggatgccggaggctgcatcaatggatggaacgctaagattgcagagttgacaggtctctcagttgaagaagctatggggaagtctctggtttctgatttaatatacaaagagaatgaagcaactgtcaataagcttctttctcgtgctttgagaggggacgaggaaaagaatgtggaggttaagctgaaaactttcagccccgaactacaagggaaagcagtttttgtggttgtgaatgcttgttccagcaaggactacttgaacaacattgtcggcgtttgttttgttggacaagacgttactagtcagaaaatcgtaatggataagttcatcaacatacaaggagattacaaggctattgtacatagcccaaaccctctaatcccgccaatttttgctgctgacgagaacacgtgctgcctggaatggaacatggcgatggaaaagcttacgggttggtctcgcagtgaagtgattgggaaaatgattgtcggggaagtgtttgggagctgttgcatgctaaagggtcctgatgctttaaccaagttcatgattgtattgcataatgcgattggtggccaagatacggataagttccctttcccattctttgaccgcaatgggaagtttgttcaggctctattgactgcaaacaagcgggttagcctcgagggaaaggttattggggctttctgtttcttgcaaatcccgagccctgagctgcagcaagctttagcagtccaacggaggcaggacacagagtgtttcacgaaggcaaaagagttggcttatatttgtcaggtgataaagaatcctttgagcggtatgcgtttcgcaaactcattgttggaggccacagacttgaacgaggaccagaagcagttacttgaaacaagtgtttcttgcgagaaacagatctcaaggatcgtcggggacatggatcttgaaagcattgaagacggttcatttgtgctaaagagggaagagtttttccttggaagtgtcataaacgcgattgtaagtcaagcgatgttcttattaagggacagaggtcttcagctgatccgtgacattcccgaagagatcaaatcaatagaggtttttggagaccagataaggattcaacagctcctggctgagtttctgctgagtataatccggtatgcaccatctcaagagtgggtggagatccatttaagccaactttcaaagcaaatggctgatggattcgccgccatccgcacagaattcagaatggcgtgtccaggtgaaggtctgcctccagagctagtccgagacatgttccatagcagcaggtggacaagccctgaaggtttaggtctaagcgtatgtcgaaagattttaaagctaatgaacggtgaggttcaatacatccgagaatcagaacggtcctatttcctcatcattctggaactccctgtacctcgaaagcgaccattgtcaactgctagtggaagtggtgacatgatgctgatgatgccatattagatggtttccggagtcgggggtagtggcggtggccgtggcggtggccgtggcggagaagaagaaccgtcgtcaagtcacactcctaataaccgaagaggaggagaacaagctcaatcgtcgggaacgaaatctctcagaccaagaagcaacactgaatcaatgagcaaagcaattcaacagtacaccgtcgacgcaagactccacgccgttttcgaacaatccggcgaatcagggaaatcattcgactactcacaatcactcaaaacgacgacgtacggttcctctgtacctgagcaacagatcacagcttatctctctcgaatccagcgaggtggttacattcagcctttcggatgtatgatcgccgtcgatgaatccagtttccggatcatcggttacagtgaaaacgccagagaaatgttagggattatgcctcaatctgttcctactcttgagaaacctgagattctagctatgggaactgatgtgagatctttgttcacttcttcgagctcgattctactcgagcgtgctttcgttgctcgagagattaccttgttaaatccggtttggatccattccaagaatactggtaaaccgttttacgccattcttcataggattgatgttggtgttgttattgatttagagccagctagaactgaagatcctgcgctttctattgctggtgctgttcaatcgcagaaactcgcggttcgtgcgatttctcagttacaggctcttcctggtggagatattaagcttttgtgtgacactgtcgtggaaagtgtgagggacttgactggttatgatcgtgttatggtttataagtttcatgaagatgagcatggagaagttgtagctgagagtaaacgagatgatttagagccttatattggactgcatgttcctgctactgatattcctcaagcgtcaaggttcttgtttaagcagaaccgtgtccgaatgatagtagattgcaatgccacacctgttcttgtggtccaggacgataggctaactcagtctatgtgcttggttggttctactcttagggctcctcatggttgtcactctcagtatatggctaacatgggatctattgcgtctttagcaatggcggttataatcaatggaaatgaagatgatgggagcaatgtagctagtggaagaagctcgatgaggctttggggtttggttgtttgccatcacacttcttctcgctgcataccgtttccgctaaggtatgcttgtgagtttttgatgcaggctttcggtttacagttaaacatggaattgcagttagctttgcaaatgtcagagaaacgcgttttgagaacgcagacactgttatgtgatatgcttctgcgtgactcgcctgctggaattgttacacagagtcccagtatcatggacttagtgaaatgtgacggtgcagcatttctttaccacgggaagtattacccgttgggtgttgctcctagtgaagttcagataaaagatgttgtggagtggttgcttgcgaatcatgcggattcaaccggattaagcactgatagtttaggcgatgcggggtatcccggtgcagctgcgttaggggatgctgtgtgcggtatggcagttgcatatatcacaaaaagagactttcttttttggtttcgatctcacactgcgaaagaaatcaaatggggaggcgctaagcatcatccggaggataaagatgatgggcaacgaatgcatcctcgttcgtcctttcaggcttttcttgaagttgttaagagccggagtcagccatgggaaactgcggaaatggatgcgattcactcgctccagcttattctgagagactcttttaaagaatctgaggcggctatgaactctaaagttgtggatggtgtggttcagccatgtagggatatggcgggggaacaggggattgatgagttaggtgcagttgcaagagagatggttaggctcattgagactgcaactgttcctatattcgctgtggatgccggaggctgcatcaatggatggaacgctaagattgcagagttgacaggtctctcagttgaagaagctatggggaagtctctggtttctgatttaatatacaaagagaatgaagcaactgtcaataagcttctttctcgtgctttgagaggggacgaggaaaagaatgtggaggttaagctgaaaactttcagccccgaactacaagggaaagcagtttttgtggttgtgaatgcttgttccagcaaggactacttgaacaacattgtcggcgtttgttttgttggacaagacgttactagtcagaaaatcgtaatggataagttcatcaacatacaaggagattacaaggctattgtacatagcccaaaccctctaatcccgccaatttttgctgctgacgagaacacgtgctgcctggaatggaacatggcgatggaaaagcttacgggttggtctcgcagtgaagtgattgggaaaatgattgtcggggaagtgtttgggagctgttgcatgctaaagggtcctgatgctttaaccaagttcatgattgtattgcataatgcgattggtggccaagatacggataagttccctttcccattctttgaccgcaatgggaagtttgttcaggctctattgactgcaaacaagcgggttagcctcgagggaaaggttattggggctttctgtttcttgcaaatcccgagccctgagctgcagcaagctttagcagtccaacggaggcaggacacagagtgtttcacgaaggcaaaagagttggcttatatttgtcaggtgataaagaatcctttgagcggtatgcgtttcgcaaactcattgttggaggccacagacttgaacgaggaccagaagcagttacttgaaacaagtgtttcttgcgagaaacagatctcaaggatcgtcggggacatggatcttgaaagcattgaagacggttcatttgtgctaaagagggaagagtttttccttggaagtgtcataaacgcgattgtaagtcaagcgatgttcttattaagggacagaggtcttcagctgatccgtgacattcccgaagagatcaaatcaatagaggtttttggagaccagataaggattcaacagctcctggctgagtttctgctgagtataatccggtatgcaccatctcaagagtgggtggagatccatttaagccaactttcaaagcaaatggctgatggattcgccgccatccgcacagaattcagaatggcgtgtccaggtgaaggtctgcctccagagctagtccgagacatgttccatagcagcaggtggacaagccctgaaggtttaggtctaagcgtatgtcgaaagattttaaagctaatgaacggtgaggttcaatacatccgagaatcagaacggtcctatttcctcatcattctggaactccctgtacctcgaaagcgaccattgtcaactgctagtggaagtggtgacatgatgctgatgatgccatattagatggtttccggagtcgggggtagtggcggtggccgtggcggtggccgtggcggagaagaagaaccgtcgtcaagtcacactcctaataaccgaagaggaggagaacaagctcaatcgtcgggaacgaaatctctcagaccaagaagcaacactgaatcaatgagcaaagcaattcaacagtacaccgtcgacgcaagactccacgccgttttcgaacaatccggcgaatcagggaaatcattcgactactcacaatcactcaaaacgacgacgtacggttcctctgtacctgagcaacagatcacagcttatctctctcgaatccagcgaggtggttacattcagcctttcggatgtatgatcgccgtcgatgaatccagtttccggatcatcggttacagtgaaaacgccagagaaatgttagggattatgcctcaatctgttcctactcttgagaaacctgagattctagctatgggaactgatgtgagatctttgttcacttcttcgagctcgattctactcgagcgtgctttcgttgctcgagagattaccttgttaaatccggtttggatccattccaagaatactggtaaaccgttttacgccattcttcataggattgatgttggtgttgttattgatttagagccagctagaactgaagatcctgcgctttctattgctggtgctgttcaatcgcagaaactcgcggttcgtgcgatttctcagttacaggctcttcctggtggagatattaagcttttgtgtgacactgtcgtggaaagtgtgagggacttgactggttatgatcgtgttatggtttataagtttcatgaagatgagcatggagaagttgtagctgagagtaaacgagatgatttagagccttatattggactgcatgttcctgctactgatattcctcaagcgtcaaggttcttgtttaagcagaaccgtgtccgaatgatagtagattgcaatgccacacctgttcttgtggtccaggacgataggctaactcagtctatgtgcttggttggttctactcttagggctcctcatggttgtcactctcagtatatggctaacatgggatctattgcgtctttagcaatggcggttataatcaatggaaatgaagatgatgggagcaatgtagctagtggaagaagctcgatgaggctttggggtttggttgtttgccatcacacttcttctcgctgcataccgtttccgctaaggtatgcttgtgagtttttgatgcaggctttcggtttacagttaaacatggaattgcagttagctttgcaaatgtcagagaaacgcgttttgagaacgcagacactgttatgtgatatgcttctgcgtgactcgcctgctggaattgttacacagagtcccagtatcatggacttagtgaaatgtgacggtgcagcatttctttaccacgggaagtattacccgttgggtgttgctcctagtgaagttcagataaaagatgttgtggagtggttgcttgcgaatcatgcggattcaaccggattaagcactgatagtttaggcgatgcggggtatcccggtgcagctgcgttaggggatgctgtgtgcggtatggcagttgcatatatcacaaaaagagactttcttttttggtttcgatctcacactgcgaaagaaatcaaatggggaggcgctaagcatcatccggaggataaagatgatgggcaacgaatgcatcctcgttcgtcctttcaggcttttcttgaagttgttaagagccggagtcagccatgggaaactgcggaaatggatgcgattcactcgctccagcttattctgagagactcttttaaagaatctgaggcggctatgaactctaaagttgtggatggtgtggttcagccatgtagggatatggcgggggaacaggggattgatgagttaggtgcagttgcaagagagatggttaggctcattgagactgcaactgttcctatattcgctgtggatgccggaggctgcatcaatggatggaacgctaagattgcagagttgacaggtctctcagttgaagaagctatggggaagtctctggtttctgatttaatatacaaagagaatgaagcaactgtcaataagcttctttctcgtgctttgagaggggacgaggaaaagaatgtggaggttaagctgaaaactttcagccccgaactacaagggaaagcagtttttgtggttgtgaatgcttgttccagcaaggactacttgaacaacattgtcggcgtttgttttgttggacaagacgttactagtcagaaaatcgtaatggataagttcatcaacatacaaggagattacaaggctattgtacatagcccaaaccctctaatcccgccaatttttgctgctgacgagaacacgtgctgcctggaatggaacatggcgatggaaaagcttacgggttggtctcgcagtgaagtgattgggaaaatgattgtcggggaagtgtttgggagctgttgcatgctaaagggtcctgatgctttaaccaagttcatgattgtattgcataatgcgattggtggccaagatacggataagttccctttcccattctttgaccgcaatgggaagtttgttcaggctctattgactgcaaacaagcgggttagcctcgagggaaaggttattggggctttctgtttcttgcaaatcccgagccctgagctgcagcaagctttagcagtccaacggaggcaggacacagagtgtttcacgaaggcaaaagagttggcttatatttgtcaggtgataaagaatcctttgagcggtatgcgtttcgcaaactcattgttggaggccacagacttgaacgaggaccagaagcagttacttgaaacaagtgtttcttgcgagaaacagatctcaaggatcgtcggggacatggatcttgaaagcattgaagacggttcatttgtgctaaagagggaagagtttttccttggaagtgtcataaacgcgattgtaagtcaagcgatgttcttattaagggacagaggtcttcagctgatccgtgacattcccgaagagatcaaatcaatagaggtttttggagaccagataaggattcaacagctcctggctgagtttctgctgagtataatccggtatgcaccatctcaagagtgggtggagatccatttaagccaactttcaaagcaaatggctgatggattcgccgccatccgcacagaattcagaatggcgtgtccaggtgaaggtctgcctccagagctagtccgagacatgttccatagcagcaggtggacaagccctgaaggtttaggtctaagcgtatgtcgaaagattttaaagctaatgaacggtgaggttcaatacatccgagaatcagaacggtcctatttcctcatcattctggaactccctgtacctcgaaagcgaccattgtcaactgctagtggaagtggtgacatgatgctgatgatgccatattagatggtttccggagtcgggggtagtggcggtggccgtggcggtggccgtggcggagaagaagaaccgtcgtcaagtcacactcctaataaccgaagaggaggagaacaagctcaatcgtcgggaacgaaatctctcagaccaagaagcaacactgaatcaatgagcaaagcaattcaacagtacaccgtcgacgcaagactccacgccgttttcgaacaatccggcgaatcagggaaatcattcgactactcacaatcactcaaaacgacgacgtacggttcctctgtacctgagcaacagatcacagcttatctctctcgaatccagcgaggtggttacattcagcctttcggatgtatgatcgccgtcgatgaatccagtttccggatcatcggttacagtgaaaacgccagagaaatgttagggattatgcctcaatctgttcctactcttgagaaacctgagattctagctatgggaactgatgtgagatctttgttcacttcttcgagctcgattctactcgagcgtgctttcgttgctcgagagattaccttgttaaatccggtttggatccattccaagaatactggtaaaccgttttacgccattcttcataggattgatgttggtgttgttattgatttagagccagctagaactgaagatcctgcgctttctattgctggtgctgttcaatcgcagaaactcgcggttcgtgcgatttctcagttacaggctcttcctggtggagatattaagcttttgtgtgacactgtcgtggaaagtgtgagggacttgactggttatgatcgtgttatggtttataagtttcatgaagatgagcatggagaagttgtagctgagagtaaacgagatgatttagagccttatattggactgcatgttcctgctactgatattcctcaagcgtcaaggttcttgtttaagcagaaccgtgtccgaatgatagtagattgcaatgccacacctgttcttgtggtccaggacgataggctaactcagtctatgtgcttggttggttctactcttagggctcctcatggttgtcactctcagtatatggctaacatgggatctattgcgtctttagcaatggcggttataatcaatggaaatgaagatgatgggagcaatgtagctagtggaagaagctcgatgaggctttggggtttggttgtttgccatcacacttcttctcgctgcataccgtttccgctaaggtatgcttgtgagtttttgatgcaggctttcggtttacagttaaacatggaattgcagttagctttgcaaatgtcagagaaacgcgttttgagaacgcagacactgttatgtgatatgcttctgcgtgactcgcctgctggaattgttacacagagtcccagtatcatggacttagtgaaatgtgacggtgcagcatttctttaccacgggaagtattacccgttgggtgttgctcctagtgaagttcagataaaagatgttgtggagtggttgcttgcgaatcatgcggattcaaccggattaagcactgatagtttaggcgatgcggggtatcccggtgcagctgcgttaggggatgctgtgtgcggtatggcagttgcatatatcacaaaaagagactttcttttttggtttcgatctcacactgcgaaagaaatcaaatggggaggcgctaagcatcatccggaggataaagatgatgggcaacgaatgcatcctcgttcgtcctttcaggcttttcttgaagttgttaagagccggagtcagccatgggaaactgcggaaatggatgcgattcactcgctccagcttattctgagagactcttttaaagaatctgaggcggctatgaactctaaagttgtggatggtgtggttcagccatgtagggatatggcgggggaacaggggattgatgagttaggtgcagttgcaagagagatggttaggctcattgagactgcaactgttcctatattcgctgtggatgccggaggctgcatcaatggatggaacgctaagattgcagagttgacaggtctctcagttgaagaagctatggggaagtctctggtttctgatttaatatacaaagagaatgaagcaactgtcaataagcttctttctcgtgctttgagaggggacgaggaaaagaatgtggaggttaagctgaaaactttcagccccgaactacaagggaaagcagtttttgtggttgtgaatgcttgttccagcaaggactacttgaacaacattgtcggcgtttgttttgttggacaagacgttactagtcagaaaatcgtaatggataagttcatcaacatacaaggagattacaaggctattgtacatagcccaaaccctctaatcccgccaatttttgctgctgacgagaacacgtgctgcctggaatggaacatggcgatggaaaagcttacgggttggtctcgcagtgaagtgattgggaaaatgattgtcggggaagtgtttgggagctgttgcatgctaaagggtcctgatgctttaaccaagttcatgattgtattgcataatgcgattggtggccaagatacggataagttccctttcccattctttgaccgcaatgggaagtttgttcaggctctattgactgcaaacaagcgggttagcctcgagggaaaggttattggggctttctgtttcttgcaaatcccgagccctgagctgcagcaagctttagcagtccaacggaggcaggacacagagtgtttcacgaaggcaaaagagttggcttatatttgtcaggtgataaagaatcctttgagcggtatgcgtttcgcaaactcattgttggaggccacagacttgaacgaggaccagaagcagttacttgaaacaagtgtttcttgcgagaaacagatctcaaggatcgtcggggacatggatcttgaaagcattgaagacggttcatttgtgctaaagagggaagagtttttccttggaagtgtcataaacgcgattgtaagtcaagcgatgttcttattaagggacagaggtcttcagctgatccgtgacattcccgaagagatcaaatcaatagaggtttttggagaccagataaggattcaacagctcctggctgagtttctgctgagtataatccggtatgcaccatctcaagagtgggtggagatccatttaagccaactttcaaagcaaatggctgatggattcgccgccatccgcacagaattcagaatggcgtgtccaggtgaaggtctgcctccagagctagtccgagacatgttccatagcagcaggtggacaagccctgaaggtttaggtctaagcgtatgtcgaaagattttaaagctaatgaacggtgaggttcaatacatccgagaatcagaacggtcctatttcctcatcattctggaactccctgtacctcgaaagcgaccattgtcaactgctagtggaagtggtgacatgatgctgatgatgccatattagatggtttccggagtcgggggtagtggcggtggccgtggcggtggccgtggcggagaagaagaaccgtcgtcaagtcacactcctaataaccgaagaggaggagaacaagctcaatcgtcgggaacgaaatctctcagaccaagaagcaacactgaatcaatgagcaaagcaattcaacagtacaccgtcgacgcaagactccacgccgttttcgaacaatccggcgaatcagggaaatcattcgactactcacaatcactcaaaacgacgacgtacggttcctctgtacctgagcaacagatcacagcttatctctctcgaatccagcgaggtggttacattcagcctttcggatgtatgatcgccgtcgatgaatccagtttccggatcatcggttacagtgaaaacgccagagaaatgttagggattatgcctcaatctgttcctactcttgagaaacctgagattctagctatgggaactgatgtgagatctttgttcacttcttcgagctcgattctactcgagcgtgctttcgttgctcgagagattaccttgttaaatccggtttggatccattccaagaatactggtaaaccgttttacgccattcttcataggattgatgttggtgttgttattgatttagagccagctagaactgaagatcctgcgctttctattgctggtgctgttcaatcgcagaaactcgcggttcgtgcgatttctcagttacaggctcttcctggtggagatattaagcttttgtgtgacactgtcgtggaaagtgtgagggacttgactggttatgatcgtgttatggtttataagtttcatgaagatgagcatggagaagttgtagctgagagtaaacgagatgatttagagccttatattggactgcatgttcctgctactgatattcctcaagcgtcaaggttcttgtttaagcagaaccgtgtccgaatgatagtagattgcaatgccacacctgttcttgtggtccaggacgataggctaactcagtctatgtgcttggttggttctactcttagggctcctcatggttgtcactctcagtatatggctaacatgggatctattgcgtctttagcaatggcggttataatcaatggaaatgaagatgatgggagcaatgtagctagtggaagaagctcgatgaggctttggggtttggttgtttgccatcacacttcttctcgctgcataccgtttccgctaaggtatgcttgtgagtttttgatgcaggctttcggtttacagttaaacatggaattgcagttagctttgcaaatgtcagagaaacgcgttttgagaacgcagacactgttatgtgatatgcttctgcgtgactcgcctgctggaattgttacacagagtcccagtatcatggacttagtgaaatgtgacggtgcagcatttctttaccacgggaagtattacccgttgggtgttgctcctagtgaagttcagataaaagatgttgtggagtggttgcttgcgaatcatgcggattcaaccggattaagcactgatagtttaggcgatgcggggtatcccggtgcagctgcgttaggggatgctgtgtgcggtatggcagttgcatatatcacaaaaagagactttcttttttggtttcgatctcacactgcgaaagaaatcaaatggggaggcgctaagcatcatccggaggataaagatgatgggcaacgaatgcatcctcgttcgtcctttcaggcttttcttgaagttgttaagagccggagtcagccatgggaaactgcggaaatggatgcgattcactcgctccagcttattctgagagactcttttaaagaatctgaggcggctatgaactctaaagttgtggatggtgtggttcagccatgtagggatatggcgggggaacaggggattgatgagttaggtgcagttgcaagagagatggttaggctcattgagactgcaactgttcctatattcgctgtggatgccggaggctgcatcaatggatggaacgctaagattgcagagttgacaggtctctcagttgaagaagctatggggaagtctctggtttctgatttaatatacaaagagaatgaagcaactgtcaataagcttctttctcgtgctttgagaggggacgaggaaaagaatgtggaggttaagctgaaaactttcagccccgaactacaagggaaagcagtttttgtggttgtgaatgcttgttccagcaaggactacttgaacaacattgtcggcgtttgttttgttggacaagacgttactagtcagaaaatcgtaatggataagttcatcaacatacaaggagattacaaggctattgtacatagcccaaaccctctaatcccgccaatttttgctgctgacgagaacacgtgctgcctggaatggaacatggcgatggaaaagcttacgggttggtctcgcagtgaagtgattgggaaaatgattgtcggggaagtgtttgggagctgttgcatgctaaagggtcctgatgctttaaccaagttcatgattgtattgcataatgcgattggtggccaagatacggataagttccctttcccattctttgaccgcaatgggaagtttgttcaggctctattgactgcaaacaagcgggttagcctcgagggaaaggttattggggctttctgtttcttgcaaatcccgagccctgagctgcagcaagctttagcagtccaacggaggcaggacacagagtgtttcacgaaggcaaaagagttggcttatatttgtcaggtgataaagaatcctttgagcggtatgcgtttcgcaaactcattgttggaggccacagacttgaacgaggaccagaagcagttacttgaaacaagtgtttcttgcgagaaacagatctcaaggatcgtcggggacatggatcttgaaagcattgaagacggttcatttgtgctaaagagggaagagtttttccttggaagtgtcataaacgcgattgtaagtcaagcgatgttcttattaagggacagaggtcttcagctgatccgtgacattcccgaagagatcaaatcaatagaggtttttggagaccagataaggattcaacagctcctggctgagtttctgctgagtataatccggtatgcaccatctcaagagtgggtggagatccatttaagccaactttcaaagcaaatggctgatggattcgccgccatccgcacagaattcagaatggcgtgtccaggtgaaggtctgcctccagagctagtccgagacatgttccatagcagcaggtggacaagccctgaaggtttaggtctaagcgtatgtcgaaagattttaaagctaatgaacggtgaggttcaatacatccgagaatcagaacggtcctatttcctcatcattctggaactccctgtacctcgaaagcgaccattgtcaactgctagtggaagtggtgacatgatgctgatgatgccatattagatggtttccggagtcgggggtagtggcggtggccgtggcggtggccgtggcggagaagaagaaccgtcgtcaagtcacactcctaataaccgaagaggaggagaacaagctcaatcgtcgggaacgaaatctctcagaccaagaagcaacactgaatcaatgagcaaagcaattcaacagtacaccgtcgacgcaagactccacgccgttttcgaacaatccggcgaatcagggaaatcattcgactactcacaatcactcaaaacgacgacgtacggttcctctgtacctgagcaacagatcacagcttatctctctcgaatccagcgaggtggttacattcagcctttcggatgtatgatcgccgtcgatgaatccagtttccggatcatcggttacagtgaaaacgccagagaaatgttagggattatgcctcaatctgttcctactcttgagaaacctgagattctagctatgggaactgatgtgagatctttgttcacttcttcgagctcgattctactcgagcgtgctttcgttgctcgagagattaccttgttaaatccggtttggatccattccaagaatactggtaaaccgttttacgccattcttcataggattgatgttggtgttgttattgatttagagccagctagaactgaagatcctgcgctttctattgctggtgctgttcaatcgcagaaactcgcggttcgtgcgatttctcagttacaggctcttcctggtggagatattaagcttttgtgtgacactgtcgtggaaagtgtgagggacttgactggttatgatcgtgttatggtttataagtttcatgaagatgagcatggagaagttgtagctgagagtaaacgagatgatttagagccttatattggactgcatgttcctgctactgatattcctcaagcgtcaaggttcttgtttaagcagaaccgtgtccgaatgatagtagattgcaatgccacacctgttcttgtggtccaggacgataggctaactcagtctatgtgcttggttggttctactcttagggctcctcatggttgtcactctcagtatatggctaacatgggatctattgcgtctttagcaatggcggttataatcaatggaaatgaagatgatgggagcaatgtagctagtggaagaagctcgatgaggctttggggtttggttgtttgccatcacacttcttctcgctgcataccgtttccgctaaggtatgcttgtgagtttttgatgcaggctttcggtttacagttaaacatggaattgcagttagctttgcaaatgtcagagaaacgcgttttgagaacgcagacactgttatgtgatatgcttctgcgtgactcgcctgctggaattgttacacagagtcccagtatcatggacttagtgaaatgtgacggtgcagcatttctttaccacgggaagtattacccgttgggtgttgctcctagtgaagttcagataaaagatgttgtggagtggttgcttgcgaatcatgcggattcaaccggattaagcactgatagtttaggcgatgcggggtatcccggtgcagctgcgttaggggatgctgtgtgcggtatggcagttgcatatatcacaaaaagagactttcttttttggtttcgatctcacactgcgaaagaaatcaaatggggaggcgctaagcatcatccggaggataaagatgatgggcaacgaatgcatcctcgttcgtcctttcaggcttttcttgaagttgttaagagccggagtcagccatgggaaactgcggaaatggatgcgattcactcgctccagcttattctgagagactcttttaaagaatctgaggcggctatgaactctaaagttgtggatggtgtggttcagccatgtagggatatggcgggggaacaggggattgatgagttaggtgcagttgcaagagagatggttaggctcattgagactgcaactgttcctatattcgctgtggatgccggaggctgcatcaatggatggaacgctaagattgcagagttgacaggtctctcagttgaagaagctatggggaagtctctggtttctgatttaatatacaaagagaatgaagcaactgtcaataagcttctttctcgtgctttgagaggggacgaggaaaagaatgtggaggttaagctgaaaactttcagccccgaactacaagggaaagcagtttttgtggttgtgaatgcttgttccagcaaggactacttgaacaacattgtcggcgtttgttttgttggacaagacgttactagtcagaaaatcgtaatggataagttcatcaacatacaaggagattacaaggctattgtacatagcccaaaccctctaatcccgccaatttttgctgctgacgagaacacgtgctgcctggaatggaacatggcgatggaaaagcttacgggttggtctcgcagtgaagtgattgggaaaatgattgtcggggaagtgtttgggagctgttgcatgctaaagggtcctgatgctttaaccaagttcatgattgtattgcataatgcgattggtggccaagatacggataagttccctttcccattctttgaccgcaatgggaagtttgttcaggctctattgactgcaaacaagcgggttagcctcgagggaaaggttattggggctttctgtttcttgcaaatcccgagccctgagctgcagcaagctttagcagtccaacggaggcaggacacagagtgtttcacgaaggcaaaagagttggcttatatttgtcaggtgataaagaatcctttgagcggtatgcgtttcgcaaactcattgttggaggccacagacttgaacgaggaccagaagcagttacttgaaacaagtgtttcttgcgagaaacagatctcaaggatcgtcggggacatggatcttgaaagcattgaagacggttcatttgtgctaaagagggaagagtttttccttggaagtgtcataaacgcgattgtaagtcaagcgatgttcttattaagggacagaggtcttcagctgatccgtgacattcccgaagagatcaaatcaatagaggtttttggagaccagataaggattcaacagctcctggctgagtttctgctgagtataatccggtatgcaccatctcaagagtgggtggagatccatttaagccaactttcaaagcaaatggctgatggattcgccgccatccgcacagaattcagaatggcgtgtccaggtgaaggtctgcctccagagctagtccgagacatgttccatagcagcaggtggacaagccctgaaggtttaggtctaagcgtatgtcgaaagattttaaagctaatgaacggtgaggttcaatacatccgagaatcagaacggtcctatttcctcatcattctggaactccctgtacctcgaaagcgaccattgtcaactgctagtggaagtggtgacatgatgctgatgatgccatattagatggtttccggagtcgggggtagtggcggtggccgtggcggtggccgtggcggagaagaagaaccgtcgtcaagtcacactcctaataaccgaagaggaggagaacaagctcaatcgtcgggaacgaaatctctcagaccaagaagcaacactgaatcaatgagcaaagcaattcaacagtacaccgtcgacgcaagactccacgccgttttcgaacaatccggcgaatcagggaaatcattcgactactcacaatcactcaaaacgacgacgtacggttcctctgtacctgagcaacagatcacagcttatctctctcgaatccagcgaggtggttacattcagcctttcggatgtatgatcgccgtcgatgaatccagtttccggatcatcggttacagtgaaaacgccagagaaatgttagggattatgcctcaatctgttcctactcttgagaaacctgagattctagctatgggaactgatgtgagatctttgttcacttcttcgagctcgattctactcgagcgtgctttcgttgctcgagagattaccttgttaaatccggtttggatccattccaagaatactggtaaaccgttttacgccattcttcataggattgatgttggtgttgttattgatttagagccagctagaactgaagatcctgcgctttctattgctggtgctgttcaatcgcagaaactcgcggttcgtgcgatttctcagttacaggctcttcctggtggagatattaagcttttgtgtgacactgtcgtggaaagtgtgagggacttgactggttatgatcgtgttatggtttataagtttcatgaagatgagcatggagaagttgtagctgagagtaaacgagatgatttagagccttatattggactgcatgttcctgctactgatattcctcaagcgtcaaggttcttgtttaagcagaaccgtgtccgaatgatagtagattgcaatgccacacctgttcttgtggtccaggacgataggctaactcagtctatgtgcttggttggttctactcttagggctcctcatggttgtcactctcagtatatggctaacatgggatctattgcgtctttagcaatggcggttataatcaatggaaatgaagatgatgggagcaatgtagctagtggaagaagctcgatgaggctttggggtttggttgtttgccatcacacttcttctcgctgcataccgtttccgctaaggtatgcttgtgagtttttgatgcaggctttcggtttacagttaaacatggaattgcagttagctttgcaaatgtcagagaaacgcgttttgagaacgcagacactgttatgtgatatgcttctgcgtgactcgcctgctggaattgttacacagagtcccagtatcatggacttagtgaaatgtgacggtgcagcatttctttaccacgggaagtattacccgttgggtgttgctcctagtgaagttcagataaaagatgttgtggagtggttgcttgcgaatcatgcggattcaaccggattaagcactgatagtttaggcgatgcggggtatcccggtgcagctgcgttaggggatgctgtgtgcggtatggcagttgcatatatcacaaaaagagactttcttttttggtttcgatctcacactgcgaaagaaatcaaatggggaggcgctaagcatcatccggaggataaagatgatgggcaacgaatgcatcctcgttcgtcctttcaggcttttcttgaagttgttaagagccggagtcagccatgggaaactgcggaaatggatgcgattcactcgctccagcttattctgagagactcttttaaagaatctgaggcggctatgaactctaaagttgtggatggtgtggttcagccatgtagggatatggcgggggaacaggggattgatgagttaggtgcagttgcaagagagatggttaggctcattgagactgcaactgttcctatattcgctgtggatgccggaggctgcatcaatggatggaacgctaagattgcagagttgacaggtctctcagttgaagaagctatggggaagtctctggtttctgatttaatatacaaagagaatgaagcaactgtcaataagcttctttctcgtgctttgagaggggacgaggaaaagaatgtggaggttaagctgaaaactttcagccccgaactacaagggaaagcagtttttgtggttgtgaatgcttgttccagcaaggactacttgaacaacattgtcggcgtttgttttgttggacaagacgttactagtcagaaaatcgtaatggataagttcatcaacatacaaggagattacaaggctattgtacatagcccaaaccctctaatcccgccaatttttgctgctgacgagaacacgtgctgcctggaatggaacatggcgatggaaaagcttacgggttggtctcgcagtgaagtgattgggaaaatgattgtcggggaagtgtttgggagctgttgcatgctaaagggtcctgatgctttaaccaagttcatgattgtattgcataatgcgattggtggccaagatacggataagttccctttcccattctttgaccgcaatgggaagtttgttcaggctctattgactgcaaacaagcgggttagcctcgagggaaaggttattggggctttctgtttcttgcaaatcccgagccctgagctgcagcaagctttagcagtccaacggaggcaggacacagagtgtttcacgaaggcaaaagagttggcttatatttgtcaggtgataaagaatcctttgagcggtatgcgtttcgcaaactcattgttggaggccacagacttgaacgaggaccagaagcagttacttgaaacaagtgtttcttgcgagaaacagatctcaaggatcgtcggggacatggatcttgaaagcattgaagacggttcatttgtgctaaagagggaagagtttttccttggaagtgtcataaacgcgattgtaagtcaagcgatgttcttattaagggacagaggtcttcagctgatccgtgacattcccgaagagatcaaatcaatagaggtttttggagaccagataaggattcaacagctcctggctgagtttctgctgagtataatccggtatgcaccatctcaagagtgggtggagatccatttaagccaactttcaaagcaaatggctgatggattcgccgccatccgcacagaattcagaatggcgtgtccaggtgaaggtctgcctccagagctagtccgagacatgttccatagcagcaggtggacaagccctgaaggtttaggtctaagcgtatgtcgaaagattttaaagctaatgaacggtgaggttcaatacatccgagaatcagaacggtcctatttcctcatcattctggaactccctgtacctcgaaagcgaccattgtcaactgctagtggaagtggtgacatgatgctgatgatgccatattagatggtttccggagtcgggggtagtggcggtggccgtggcggtggccgtggcggagaagaagaaccgtcgtcaagtcacactcctaataaccgaagaggaggagaacaagctcaatcgtcgggaacgaaatctctcagaccaagaagcaacactgaatcaatgagcaaagcaattcaacagtacaccgtcgacgcaagactccacgccgttttcgaacaatccggcgaatcagggaaatcattcgactactcacaatcactcaaaacgacgacgtacggttcctctgtacctgagcaacagatcacagcttatctctctcgaatccagcgaggtggttacattcagcctttcggatgtatgatcgccgtcgatgaatccagtttccggatcatcggttacagtgaaaacgccagagaaatgttagggattatgcctcaatctgttcctactcttgagaaacctgagattctagctatgggaactgatgtgagatctttgttcacttcttcgagctcgattctactcgagcgtgctttcgttgctcgagagattaccttgttaaatccggtttggatccattccaagaatactggtaaaccgttttacgccattcttcataggattgatgttggtgttgttattgatttagagccagctagaactgaagatcctgcgctttctattgctggtgctgttcaatcgcagaaactcgcggttcgtgcgatttctcagttacaggctcttcctggtggagatattaagcttttgtgtgacactgtcgtggaaagtgtgagggacttgactggttatgatcgtgttatggtttataagtttcatgaagatgagcatggagaagttgtagctgagagtaaacgagatgatttagagccttatattggactgcatgttcctgctactgatattcctcaagcgtcaaggttcttgtttaagcagaaccgtgtccgaatgatagtagattgcaatgccacacctgttcttgtggtccaggacgataggctaactcagtctatgtgcttggttggttctactcttagggctcctcatggttgtcactctcagtatatggctaacatgggatctattgcgtctttagcaatggcggttataatcaatggaaatgaagatgatgggagcaatgtagctagtggaagaagctcgatgaggctttggggtttggttgtttgccatcacacttcttctcgctgcataccgtttccgctaaggtatgcttgtgagtttttgatgcaggctttcggtttacagttaaacatggaattgcagttagctttgcaaatgtcagagaaacgcgttttgagaacgcagacactgttatgtgatatgcttctgcgtgactcgcctgctggaattgttacacagagtcccagtatcatggacttagtgaaatgtgacggtgcagcatttctttaccacgggaagtattacccgttgggtgttgctcctagtgaagttcagataaaagatgttgtggagtggttgcttgcgaatcatgcggattcaaccggattaagcactgatagtttaggcgatgcggggtatcccggtgcagctgcgttaggggatgctgtgtgcggtatggcagttgcatatatcacaaaaagagactttcttttttggtttcgatctcacactgcgaaagaaatcaaatggggaggcgctaagcatcatccggaggataaagatgatgggcaacgaatgcatcctcgttcgtcctttcaggcttttcttgaagttgttaagagccggagtcagccatgggaaactgcggaaatggatgcgattcactcgctccagcttattctgagagactcttttaaagaatctgaggcggctatgaactctaaagttgtggatggtgtggttcagccatgtagggatatggcgggggaacaggggattgatgagttaggtgcagttgcaagagagatggttaggctcattgagactgcaactgttcctatattcgctgtggatgccggaggctgcatcaatggatggaacgctaagattgcagagttgacaggtctctcagttgaagaagctatggggaagtctctggtttctgatttaatatacaaagagaatgaagcaactgtcaataagcttctttctcgtgctttgagaggggacgaggaaaagaatgtggaggttaagctgaaaactttcagccccgaactacaagggaaagcagtttttgtggttgtgaatgcttgttccagcaaggactacttgaacaacattgtcggcgtttgttttgttggacaagacgttactagtcagaaaatcgtaatggataagttcatcaacatacaaggagattacaaggctattgtacatagcccaaaccctctaatcccgccaatttttgctgctgacgagaacacgtgctgcctggaatggaacatggcgatggaaaagcttacgggttggtctcgcagtgaagtgattgggaaaatgattgtcggggaagtgtttgggagctgttgcatgctaaagggtcctgatgctttaaccaagttcatgattgtattgcataatgcgattggtggccaagatacggataagttccctttcccattctttgaccgcaatgggaagtttgttcaggctctattgactgcaaacaagcgggttagcctcgagggaaaggttattggggctttctgtttcttgcaaatcccgagccctgagctgcagcaagctttagcagtccaacggaggcaggacacagagtgtttcacgaaggcaaaagagttggcttatatttgtcaggtgataaagaatcctttgagcggtatgcgtttcgcaaactcattgttggaggccacagacttgaacgaggaccagaagcagttacttgaaacaagtgtttcttgcgagaaacagatctcaaggatcgtcggggacatggatcttgaaagcattgaagacggttcatttgtgctaaagagggaagagtttttccttggaagtgtcataaacgcgattgtaagtcaagcgatgttcttattaagggacagaggtcttcagctgatccgtgacattcccgaagagatcaaatcaatagaggtttttggagaccagataaggattcaacagctcctggctgagtttctgctgagtataatccggtatgcaccatctcaagagtgggtggagatccatttaagccaactttcaaagcaaatggctgatggattcgccgccatccgcacagaattcagaatggcgtgtccaggtgaaggtctgcctccagagctagtccgagacatgttccatagcagcaggtggacaagccctgaaggtttaggtctaagcgtatgtcgaaagattttaaagctaatgaacggtgaggttcaatacatccgagaatcagaacggtcctatttcctcatcattctggaactccctgtacctcgaaagcgaccattgtcaactgctagtggaagtggtgacatgatgctgatgatgccatattagatggtttccggagtcgggggtagtggcggtggccgtggcggtggccgtggcggagaagaagaaccgtcgtcaagtcacactcctaataaccgaagaggaggagaacaagctcaatcgtcgggaacgaaatctctcagaccaagaagcaacactgaatcaatgagcaaagcaattcaacagtacaccgtcgacgcaagactccacgccgttttcgaacaatccggcgaatcagggaaatcattcgactactcacaatcactcaaaacgacgacgtacggttcctctgtacctgagcaacagatcacagcttatctctctcgaatccagcgaggtggttacattcagcctttcggatgtatgatcgccgtcgatgaatccagtttccggatcatcggttacagtgaaaacgccagagaaatgttagggattatgcctcaatctgttcctactcttgagaaacctgagattctagctatgggaactgatgtgagatctttgttcacttcttcgagctcgattctactcgagcgtgctttcgttgctcgagagattaccttgttaaatccggtttggatccattccaagaatactggtaaaccgttttacgccattcttcataggattgatgttggtgttgttattgatttagagccagctagaactgaagatcctgcgctttctattgctggtgctgttcaatcgcagaaactcgcggttcgtgcgatttctcagttacaggctcttcctggtggagatattaagcttttgtgtgacactgtcgtggaaagtgtgagggacttgactggttatgatcgtgttatggtttataagtttcatgaagatgagcatggagaagttgtagctgagagtaaacgagatgatttagagccttatattggactgcatgttcctgctactgatattcctcaagcgtcaaggttcttgtttaagcagaaccgtgtccgaatgatagtagattgcaatgccacacctgttcttgtggtccaggacgataggctaactcagtctatgtgcttggttggttctactcttagggctcctcatggttgtcactctcagtatatggctaacatgggatctattgcgtctttagcaatggcggttataatcaatggaaatgaagatgatgggagcaatgtagctagtggaagaagctcgatgaggctttggggtttggttgtttgccatcacacttcttctcgctgcataccgtttccgctaaggtatgcttgtgagtttttgatgcaggctttcggtttacagttaaacatggaattgcagttagctttgcaaatgtcagagaaacgcgttttgagaacgcagacactgttatgtgatatgcttctgcgtgactcgcctgctggaattgttacacagagtcccagtatcatggacttagtgaaatgtgacggtgcagcatttctttaccacgggaagtattacccgttgggtgttgctcctagtgaagttcagataaaagatgttgtggagtggttgcttgcgaatcatgcggattcaaccggattaagcactgatagtttaggcgatgcggggtatcccggtgcagctgcgttaggggatgctgtgtgcggtatggcagttgcatatatcacaaaaagagactttcttttttggtttcgatctcacactgcgaaagaaatcaaatggggaggcgctaagcatcatccggaggataaagatgatgggcaacgaatgcatcctcgttcgtcctttcaggcttttcttgaagttgttaagagccggagtcagccatgggaaactgcggaaatggatgcgattcactcgctccagcttattctgagagactcttttaaagaatctgaggcggctatgaactctaaagttgtggatggtgtggttcagccatgtagggatatggcgggggaacaggggattgatgagttaggtgcagttgcaagagagatggttaggctcattgagactgcaactgttcctatattcgctgtggatgccggaggctgcatcaatggatggaacgctaagattgcagagttgacaggtctctcagttgaagaagctatggggaagtctctggtttctgatttaatatacaaagagaatgaagcaactgtcaataagcttctttctcgtgctttgagaggggacgaggaaaagaatgtggaggttaagctgaaaactttcagccccgaactacaagggaaagcagtttttgtggttgtgaatgcttgttccagcaaggactacttgaacaacattgtcggcgtttgttttgttggacaagacgttactagtcagaaaatcgtaatggataagttcatcaacatacaaggagattacaaggctattgtacatagcccaaaccctctaatcccgccaatttttgctgctgacgagaacacgtgctgcctggaatggaacatggcgatggaaaagcttacgggttggtctcgcagtgaagtgattgggaaaatgattgtcggggaagtgtttgggagctgttgcatgctaaagggtcctgatgctttaaccaagttcatgattgtattgcataatgcgattggtggccaagatacggataagttccctttcccattctttgaccgcaatgggaagtttgttcaggctctattgactgcaaacaagcgggttagcctcgagggaaaggttattggggctttctgtttcttgcaaatcccgagccctgagctgcagcaagctttagcagtccaacggaggcaggacacagagtgtttcacgaaggcaaaagagttggcttatatttgtcaggtgataaagaatcctttgagcggtatgcgtttcgcaaactcattgttggaggccacagacttgaacgaggaccagaagcagttacttgaaacaagtgtttcttgcgagaaacagatctcaaggatcgtcggggacatggatcttgaaagcattgaagacggttcatttgtgctaaagagggaagagtttttccttggaagtgtcataaacgcgattgtaagtcaagcgatgttcttattaagggacagaggtcttcagctgatccgtgacattcccgaagagatcaaatcaatagaggtttttggagaccagataaggattcaacagctcctggctgagtttctgctgagtataatccggtatgcaccatctcaagagtgggtggagatccatttaagccaactttcaaagcaaatggctgatggattcgccgccatccgcacagaattcagaatggcgtgtccaggtgaaggtctgcctccagagctagtccgagacatgttccatagcagcaggtggacaagccctgaaggtttaggtctaagcgtatgtcgaaagattttaaagctaatgaacggtgaggttcaatacatccgagaatcagaacggtcctatttcctcatcattctggaactccctgtacctcgaaagcgaccattgtcaactgctagtggaagtggtgacatgatgctgatgatgccatattagatggtttccggagtcgggggtagtggcggtggccgtggcggtggccgtggcggagaagaagaaccgtcgtcaagtcacactcctaataaccgaagaggaggagaacaagctcaatcgtcgggaacgaaatctctcagaccaagaagcaacactgaatcaatgagcaaagcaattcaacagtacaccgtcgacgcaagactccacgccgttttcgaacaatccggcgaatcagggaaatcattcgactactcacaatcactcaaaacgacgacgtacggttcctctgtacctgagcaacagatcacagcttatctctctcgaatccagcgaggtggttacattcagcctttcggatgtatgatcgccgtcgatgaatccagtttccggatcatcggttacagtgaaaacgccagagaaatgttagggattatgcctcaatctgttcctactcttgagaaacctgagattctagctatgggaactgatgtgagatctttgttcacttcttcgagctcgattctactcgagcgtgctttcgttgctcgagagattaccttgttaaatccggtttggatccattccaagaatactggtaaaccgttttacgccattcttcataggattgatgttggtgttgttattgatttagagccagctagaactgaagatcctgcgctttctattgctggtgctgttcaatcgcagaaactcgcggttcgtgcgatttctcagttacaggctcttcctggtggagatattaagcttttgtgtgacactgtcgtggaaagtgtgagggacttgactggttatgatcgtgttatggtttataagtttcatgaagatgagcatggagaagttgtagctgagagtaaacgagatgatttagagccttatattggactgcatgttcctgctactgatattcctcaagcgtcaaggttcttgtttaagcagaaccgtgtccgaatgatagtagattgcaatgccacacctgttcttgtggtccaggacgataggctaactcagtctatgtgcttggttggttctactcttagggctcctcatggttgtcactctcagtatatggctaacatgggatctattgcgtctttagcaatggcggttataatcaatggaaatgaagatgatgggagcaatgtagctagtggaagaagctcgatgaggctttggggtttggttgtttgccatcacacttcttctcgctgcataccgtttccgctaaggtatgcttgtgagtttttgatgcaggctttcggtttacagttaaacatggaattgcagttagctttgcaaatgtcagagaaacgcgttttgagaacgcagacactgttatgtgatatgcttctgcgtgactcgcctgctggaattgttacacagagtcccagtatcatggacttagtgaaatgtgacggtgcagcatttctttaccacgggaagtattacccgttgggtgttgctcctagtgaagttcagataaaagatgttgtggagtggttgcttgcgaatcatgcggattcaaccggattaagcactgatagtttaggcgatgcggggtatcccggtgcagctgcgttaggggatgctgtgtgcggtatggcagttgcatatatcacaaaaagagactttcttttttggtttcgatctcacactgcgaaagaaatcaaatggggaggcgctaagcatcatccggaggataaagatgatgggcaacgaatgcatcctcgttcgtcctttcaggcttttcttgaagttgttaagagccggagtcagccatgggaaactgcggaaatggatgcgattcactcgctccagcttattctgagagactcttttaaagaatctgaggcggctatgaactctaaagttgtggatggtgtggttcagccatgtagggatatggcgggggaacaggggattgatgagttaggtgcagttgcaagagagatggttaggctcattgagactgcaactgttcctatattcgctgtggatgccggaggctgcatcaatggatggaacgctaagattgcagagttgacaggtctctcagttgaagaagctatggggaagtctctggtttctgatttaatatacaaagagaatgaagcaactgtcaataagcttctttctcgtgctttgagaggggacgaggaaaagaatgtggaggttaagctgaaaactttcagccccgaactacaagggaaagcagtttttgtggttgtgaatgcttgttccagcaaggactacttgaacaacattgtcggcgtttgttttgttggacaagacgttactagtcagaaaatcgtaatggataagttcatcaacatacaaggagattacaaggctattgtacatagcccaaaccctctaatcccgccaatttttgctgctgacgagaacacgtgctgcctggaatggaacatggcgatggaaaagcttacgggttggtctcgcagtgaagtgattgggaaaatgattgtcggggaagtgtttgggagctgttgcatgctaaagggtcctgatgctttaaccaagttcatgattgtattgcataatgcgattggtggccaagatacggataagttccctttcccattctttgaccgcaatgggaagtttgttcaggctctattgactgcaaacaagcgggttagcctcgagggaaaggttattggggctttctgtttcttgcaaatcccgagccctgagctgcagcaagctttagcagtccaacggaggcaggacacagagtgtttcacgaaggcaaaagagttggcttatatttgtcaggtgataaagaatcctttgagcggtatgcgtttcgcaaactcattgttggaggccacagacttgaacgaggaccagaagcagttacttgaaacaagtgtttcttgcgagaaacagatctcaaggatcgtcggggacatggatcttgaaagcattgaagacggttcatttgtgctaaagagggaagagtttttccttggaagtgtcataaacgcgattgtaagtcaagcgatgttcttattaagggacagaggtcttcagctgatccgtgacattcccgaagagatcaaatcaatagaggtttttggagaccagataaggattcaacagctcctggctgagtttctgctgagtataatccggtatgcaccatctcaagagtgggtggagatccatttaagccaactttcaaagcaaatggctgatggattcgccgccatccgcacagaattcagaatggcgtgtccaggtgaaggtctgcctccagagctagtccgagacatgttccatagcagcaggtggacaagccctgaaggtttaggtctaagcgtatgtcgaaagattttaaagctaatgaacggtgaggttcaatacatccgagaatcagaacggtcctatttcctcatcattctggaactccctgtacctcgaaagcgaccattgtcaactgctagtggaagtggtgacatgatgctgatgatgccatattagatggtttccggagtcgggggtagtggcggtggccgtggcggtggccgtggcggagaagaagaaccgtcgtcaagtcacactcctaataaccgaagaggaggagaacaagctcaatcgtcgggaacgaaatctctcagaccaagaagcaacactgaatcaatgagcaaagcaattcaacagtacaccgtcgacgcaagactccacgccgttttcgaacaatccggcgaatcagggaaatcattcgactactcacaatcactcaaaacgacgacgtacggttcctctgtacctgagcaacagatcacagcttatctctctcgaatccagcgaggtggttacattcagcctttcggatgtatgatcgccgtcgatgaatccagtttccggatcatcggttacagtgaaaacgccagagaaatgttagggattatgcctcaatctgttcctactcttgagaaacctgagattctagctatgggaactgatgtgagatctttgttcacttcttcgagctcgattctactcgagcgtgctttcgttgctcgagagattaccttgttaaatccggtttggatccattccaagaatactggtaaaccgttttacgccattcttcataggattgatgttggtgttgttattgatttagagccagctagaactgaagatcctgcgctttctattgctggtgctgttcaatcgcagaaactcgcggttcgtgcgatttctcagttacaggctcttcctggtggagatattaagcttttgtgtgacactgtcgtggaaagtgtgagggacttgactggttatgatcgtgttatggtttataagtttcatgaagatgagcatggagaagttgtagctgagagtaaacgagatgatttagagccttatattggactgcatgttcctgctactgatattcctcaagcgtcaaggttcttgtttaagcagaaccgtgtccgaatgatagtagattgcaatgccacacctgttcttgtggtccaggacgataggctaactcagtctatgtgcttggttggttctactcttagggctcctcatggttgtcactctcagtatatggctaacatgggatctattgcgtctttagcaatggcggttataatcaatggaaatgaagatgatgggagcaatgtagctagtggaagaagctcgatgaggctttggggtttggttgtttgccatcacacttcttctcgctgcataccgtttccgctaaggtatgcttgtgagtttttgatgcaggctttcggtttacagttaaacatggaattgcagttagctttgcaaatgtcagagaaacgcgttttgagaacgcagacactgttatgtgatatgcttctgcgtgactcgcctgctggaattgttacacagagtcccagtatcatggacttagtgaaatgtgacggtgcagcatttctttaccacgggaagtattacccgttgggtgttgctcctagtgaagttcagataaaagatgttgtggagtggttgcttgcgaatcatgcggattcaaccggattaagcactgatagtttaggcgatgcggggtatcccggtgcagctgcgttaggggatgctgtgtgcggtatggcagttgcatatatcacaaaaagagactttcttttttggtttcgatctcacactgcgaaagaaatcaaatggggaggcgctaagcatcatccggaggataaagatgatgggcaacgaatgcatcctcgttcgtcctttcaggcttttcttgaagttgttaagagccggagtcagccatgggaaactgcggaaatggatgcgattcactcgctccagcttattctgagagactcttttaaagaatctgaggcggctatgaactctaaagttgtggatggtgtggttcagccatgtagggatatggcgggggaacaggggattgatgagttaggtgcagttgcaagagagatggttaggctcattgagactgcaactgttcctatattcgctgtggatgccggaggctgcatcaatggatggaacgctaagattgcagagttgacaggtctctcagttgaagaagctatggggaagtctctggtttctgatttaatatacaaagagaatgaagcaactgtcaataagcttctttctcgtgctttgagaggggacgaggaaaagaatgtggaggttaagctgaaaactttcagccccgaactacaagggaaagcagtttttgtggttgtgaatgcttgttccagcaaggactacttgaacaacattgtcggcgtttgttttgttggacaagacgttactagtcagaaaatcgtaatggataagttcatcaacatacaaggagattacaaggctattgtacatagcccaaaccctctaatcccgccaatttttgctgctgacgagaacacgtgctgcctggaatggaacatggcgatggaaaagcttacgggttggtctcgcagtgaagtgattgggaaaatgattgtcggggaagtgtttgggagctgttgcatgctaaagggtcctgatgctttaaccaagttcatgattgtattgcataatgcgattggtggccaagatacggataagttccctttcccattctttgaccgcaatgggaagtttgttcaggctctattgactgcaaacaagcgggttagcctcgagggaaaggttattggggctttctgtttcttgcaaatcccgagccctgagctgcagcaagctttagcagtccaacggaggcaggacacagagtgtttcacgaaggcaaaagagttggcttatatttgtcaggtgataaagaatcctttgagcggtatgcgtttcgcaaactcattgttggaggccacagacttgaacgaggaccagaagcagttacttgaaacaagtgtttcttgcgagaaacagatctcaaggatcgtcggggacatggatcttgaaagcattgaagacggttcatttgtgctaaagagggaagagtttttccttggaagtgtcataaacgcgattgtaagtcaagcgatgttcttattaagggacagaggtcttcagctgatccgtgacattcccgaagagatcaaatcaatagaggtttttggagaccagataaggattcaacagctcctggctgagtttctgctgagtataatccggtatgcaccatctcaagagtgggtggagatccatttaagccaactttcaaagcaaatggctgatggattcgccgccatccgcacagaattcagaatggcgtgtccaggtgaaggtctgcctccagagctagtccgagacatgttccatagcagcaggtggacaagccctgaaggtttaggtctaagcgtatgtcgaaagattttaaagctaatgaacggtgaggttcaatacatccgagaatcagaacggtcctatttcctcatcattctggaactccctgtacctcgaaagcgaccattgtcaactgctagtggaagtggtgacatgatgctgatgatgccatattagatggtttccggagtcgggggtagtggcggtggccgtggcggtggccgtggcggagaagaagaaccgtcgtcaagtcacactcctaataaccgaagaggaggagaacaagctcaatcgtcgggaacgaaatctctcagaccaagaagcaacactgaatcaatgagcaaagcaattcaacagtacaccgtcgacgcaagactccacgccgttttcgaacaatccggcgaatcagggaaatcattcgactactcacaatcactcaaaacgacgacgtacggttcctctgtacctgagcaacagatcacagcttatctctctcgaatccagcgaggtggttacattcagcctttcggatgtatgatcgccgtcgatgaatccagtttccggatcatcggttacagtgaaaacgccagagaaatgttagggattatgcctcaatctgttcctactcttgagaaacctgagattctagctatgggaactgatgtgagatctttgttcacttcttcgagctcgattctactcgagcgtgctttcgttgctcgagagattaccttgttaaatccggtttggatccattccaagaatactggtaaaccgttttacgccattcttcataggattgatgttggtgttgttattgatttagagccagctagaactgaagatcctgcgctttctattgctggtgctgttcaatcgcagaaactcgcggttcgtgcgatttctcagttacaggctcttcctggtggagatattaagcttttgtgtgacactgtcgtggaaagtgtgagggacttgactggttatgatcgtgttatggtttataagtttcatgaagatgagcatggagaagttgtagctgagagtaaacgagatgatttagagccttatattggactgcatgttcctgctactgatattcctcaagcgtcaaggttcttgtttaagcagaaccgtgtccgaatgatagtagattgcaatgccacacctgttcttgtggtccaggacgataggctaactcagtctatgtgcttggttggttctactcttagggctcctcatggttgtcactctcagtatatggctaacatgggatctattgcgtctttagcaatggcggttataatcaatggaaatgaagatgatgggagcaatgtagctagtggaagaagctcgatgaggctttggggtttggttgtttgccatcacacttcttctcgctgcataccgtttccgctaaggtatgcttgtgagtttttgatgcaggctttcggtttacagttaaacatggaattgcagttagctttgcaaatgtcagagaaacgcgttttgagaacgcagacactgttatgtgatatgcttctgcgtgactcgcctgctggaattgttacacagagtcccagtatcatggacttagtgaaatgtgacggtgcagcatttctttaccacgggaagtattacccgttgggtgttgctcctagtgaagttcagataaaagatgttgtggagtggttgcttgcgaatcatgcggattcaaccggattaagcactgatagtttaggcgatgcggggtatcccggtgcagctgcgttaggggatgctgtgtgcggtatggcagttgcatatatcacaaaaagagactttcttttttggtttcgatctcacactgcgaaagaaatcaaatggggaggcgctaagcatcatccggaggataaagatgatgggcaacgaatgcatcctcgttcgtcctttcaggcttttcttgaagttgttaagagccggagtcagccatgggaaactgcggaaatggatgcgattcactcgctccagcttattctgagagactcttttaaagaatctgaggcggctatgaactctaaagttgtggatggtgtggttcagccatgtagggatatggcgggggaacaggggattgatgagttaggtgcagttgcaagagagatggttaggctcattgagactgcaactgttcctatattcgctgtggatgccggaggctgcatcaatggatggaacgctaagattgcagagttgacaggtctctcagttgaagaagctatggggaagtctctggtttctgatttaatatacaaagagaatgaagcaactgtcaataagcttctttctcgtgctttgagaggggacgaggaaaagaatgtggaggttaagctgaaaactttcagccccgaactacaagggaaagcagtttttgtggttgtgaatgcttgttccagcaaggactacttgaacaacattgtcggcgtttgttttgttggacaagacgttactagtcagaaaatcgtaatggataagttcatcaacatacaaggagattacaaggctattgtacatagcccaaaccctctaatcccgccaatttttgctgctgacgagaacacgtgctgcctggaatggaacatggcgatggaaaagcttacgggttggtctcgcagtgaagtgattgggaaaatgattgtcggggaagtgtttgggagctgttgcatgctaaagggtcctgatgctttaaccaagttcatgattgtattgcataatgcgattggtggccaagatacggataagttccctttcccattctttgaccgcaatgggaagtttgttcaggctctattgactgcaaacaagcgggttagcctcgagggaaaggttattggggctttctgtttcttgcaaatcccgagccctgagctgcagcaagctttagcagtccaacggaggcaggacacagagtgtttcacgaaggcaaaagagttggcttatatttgtcaggtgataaagaatcctttgagcggtatgcgtttcgcaaactcattgttggaggccacagacttgaacgaggaccagaagcagttacttgaaacaagtgtttcttgcgagaaacagatctcaaggatcgtcggggacatggatcttgaaagcattgaagacggttcatttgtgctaaagagggaagagtttttccttggaagtgtcataaacgcgattgtaagtcaagcgatgttcttattaagggacagaggtcttcagctgatccgtgacattcccgaagagatcaaatcaatagaggtttttggagaccagataaggattcaacagctcctggctgagtttctgctgagtataatccggtatgcaccatctcaagagtgggtggagatccatttaagccaactttcaaagcaaatggctgatggattcgccgccatccgcacagaattcagaatggcgtgtccaggtgaaggtctgcctccagagctagtccgagacatgttccatagcagcaggtggacaagccctgaaggtttaggtctaagcgtatgtcgaaagattttaaagctaatgaacggtgaggttcaatacatccgagaatcagaacggtcctatttcctcatcattctggaactccctgtacctcgaaagcgaccattgtcaactgctagtggaagtggtgacatgatgctgatgatgccatattagatggtttccggagtcgggggtagtggcggtggccgtggcggtggccgtggcggagaagaagaaccgtcgtcaagtcacactcctaataaccgaagaggaggagaacaagctcaatcgtcgggaacgaaatctctcagaccaagaagcaacactgaatcaatgagcaaagcaattcaacagtacaccgtcgacgcaagactccacgccgttttcgaacaatccggcgaatcagggaaatcattcgactactcacaatcactcaaaacgacgacgtacggttcctctgtacctgagcaacagatcacagcttatctctctcgaatccagcgaggtggttacattcagcctttcggatgtatgatcgccgtcgatgaatccagtttccggatcatcggttacagtgaaaacgccagagaaatgttagggattatgcctcaatctgttcctactcttgagaaacctgagattctagctatgggaactgatgtgagatctttgttcacttcttcgagctcgattctactcgagcgtgctttcgttgctcgagagattaccttgttaaatccggtttggatccattccaagaatactggtaaaccgttttacgccattcttcataggattgatgttggtgttgttattgatttagagccagctagaactgaagatcctgcgctttctattgctggtgctgttcaatcgcagaaactcgcggttcgtgcgatttctcagttacaggctcttcctggtggagatattaagcttttgtgtgacactgtcgtggaaagtgtgagggacttgactggttatgatcgtgttatggtttataagtttcatgaagatgagcatggagaagttgtagctgagagtaaacgagatgatttagagccttatattggactgcatgttcctgctactgatattcctcaagcgtcaaggttcttgtttaagcagaaccgtgtccgaatgatagtagattgcaatgccacacctgttcttgtggtccaggacgataggctaactcagtctatgtgcttggttggttctactcttagggctcctcatggttgtcactctcagtatatggctaacatgggatctattgcgtctttagcaatggcggttataatcaatggaaatgaagatgatgggagcaatgtagctagtggaagaagctcgatgaggctttggggtttggttgtttgccatcacacttcttctcgctgcataccgtttccgctaaggtatgcttgtgagtttttgatgcaggctttcggtttacagttaaacatggaattgcagttagctttgcaaatgtcagagaaacgcgttttgagaacgcagacactgttatgtgatatgcttctgcgtgactcgcctgctggaattgttacacagagtcccagtatcatggacttagtgaaatgtgacggtgcagcatttctttaccacgggaagtattacccgttgggtgttgctcctagtgaagttcagataaaagatgttgtggagtggttgcttgcgaatcatgcggattcaaccggattaagcactgatagtttaggcgatgcggggtatcccggtgcagctgcgttaggggatgctgtgtgcggtatggcagttgcatatatcacaaaaagagactttcttttttggtttcgatctcacactgcgaaagaaatcaaatggggaggcgctaagcatcatccggaggataaagatgatgggcaacgaatgcatcctcgttcgtcctttcaggcttttcttgaagttgttaagagccggagtcagccatgggaaactgcggaaatggatgcgattcactcgctccagcttattctgagagactcttttaaagaatctgaggcggctatgaactctaaagttgtggatggtgtggttcagccatgtagggatatggcgggggaacaggggattgatgagttaggtgcagttgcaagagagatggttaggctcattgagactgcaactgttcctatattcgctgtggatgccggaggctgcatcaatggatggaacgctaagattgcagagttgacaggtctctcagttgaagaagctatggggaagtctctggtttctgatttaatatacaaagagaatgaagcaactgtcaataagcttctttctcgtgctttgagaggggacgaggaaaagaatgtggaggttaagctgaaaactttcagccccgaactacaagggaaagcagtttttgtggttgtgaatgcttgttccagcaaggactacttgaacaacattgtcggcgtttgttttgttggacaagacgttactagtcagaaaatcgtaatggataagttcatcaacatacaaggagattacaaggctattgtacatagcccaaaccctctaatcccgccaatttttgctgctgacgagaacacgtgctgcctggaatggaacatggcgatggaaaagcttacgggttggtctcgcagtgaagtgattgggaaaatgattgtcggggaagtgtttgggagctgttgcatgctaaagggtcctgatgctttaaccaagttcatgattgtattgcataatgcgattggtggccaagatacggataagttccctttcccattctttgaccgcaatgggaagtttgttcaggctctattgactgcaaacaagcgggttagcctcgagggaaaggttattggggctttctgtttcttgcaaatcccgagccctgagctgcagcaagctttagcagtccaacggaggcaggacacagagtgtttcacgaaggcaaaagagttggcttatatttgtcaggtgataaagaatcctttgagcggtatgcgtttcgcaaactcattgttggaggccacagacttgaacgaggaccagaagcagttacttgaaacaagtgtttcttgcgagaaacagatctcaaggatcgtcggggacatggatcttgaaagcattgaagacggttcatttgtgctaaagagggaagagtttttccttggaagtgtcataaacgcgattgtaagtcaagcgatgttcttattaagggacagaggtcttcagctgatccgtgacattcccgaagagatcaaatcaatagaggtttttggagaccagataaggattcaacagctcctggctgagtttctgctgagtataatccggtatgcaccatctcaagagtgggtggagatccatttaagccaactttcaaagcaaatggctgatggattcgccgccatccgcacagaattcagaatggcgtgtccaggtgaaggtctgcctccagagctagtccgagacatgttccatagcagcaggtggacaagccctgaaggtttaggtctaagcgtatgtcgaaagattttaaagctaatgaacggtgaggttcaatacatccgagaatcagaacggtcctatttcctcatcattctggaactccctgtacctcgaaagcgaccattgtcaactgctagtggaagtggtgacatgatgctgatgatgccatattagatggtttccggagtcgggggtagtggcggtggccgtggcggtggccgtggcggagaagaagaaccgtcgtcaagtcacactcctaataaccgaagaggaggagaacaagctcaatcgtcgggaacgaaatctctcagaccaagaagcaacactgaatcaatgagcaaagcaattcaacagtacaccgtcgacgcaagactccacgccgttttcgaacaatccggcgaatcagggaaatcattcgactactcacaatcactcaaaacgacgacgtacggttcctctgtacctgagcaacagatcacagcttatctctctcgaatccagcgaggtggttacattcagcctttcggatgtatgatcgccgtcgatgaatccagtttccggatcatcggttacagtgaaaacgccagagaaatgttagggattatgcctcaatctgttcctactcttgagaaacctgagattctagctatgggaactgatgtgagatctttgttcacttcttcgagctcgattctactcgagcgtgctttcgttgctcgagagattaccttgttaaatccggtttggatccattccaagaatactggtaaaccgttttacgccattcttcataggattgatgttggtgttgttattgatttagagccagctagaactgaagatcctgcgctttctattgctggtgctgttcaatcgcagaaactcgcggttcgtgcgatttctcagttacaggctcttcctggtggagatattaagcttttgtgtgacactgtcgtggaaagtgtgagggacttgactggttatgatcgtgttatggtttataagtttcatgaagatgagcatggagaagttgtagctgagagtaaacgagatgatttagagccttatattggactgcatgttcctgctactgatattcctcaagcgtcaaggttcttgtttaagcagaaccgtgtccgaatgatagtagattgcaatgccacacctgttcttgtggtccaggacgataggctaactcagtctatgtgcttggttggttctactcttagggctcctcatggttgtcactctcagtatatggctaacatgggatctattgcgtctttagcaatggcggttataatcaatggaaatgaagatgatgggagcaatgtagctagtggaagaagctcgatgaggctttggggtttggttgtttgccatcacacttcttctcgctgcataccgtttccgctaaggtatgcttgtgagtttttgatgcaggctttcggtttacagttaaacatggaattgcagttagctttgcaaatgtcagagaaacgcgttttgagaacgcagacactgttatgtgatatgcttctgcgtgactcgcctgctggaattgttacacagagtcccagtatcatggacttagtgaaatgtgacggtgcagcatttctttaccacgggaagtattacccgttgggtgttgctcctagtgaagttcagataaaagatgttgtggagtggttgcttgcgaatcatgcggattcaaccggattaagcactgatagtttaggcgatgcggggtatcccggtgcagctgcgttaggggatgctgtgtgcggtatggcagttgcatatatcacaaaaagagactttcttttttggtttcgatctcacactgcgaaagaaatcaaatggggaggcgctaagcatcatccggaggataaagatgatgggcaacgaatgcatcctcgttcgtcctttcaggcttttcttgaagttgttaagagccggagtcagccatgggaaactgcggaaatggatgcgattcactcgctccagcttattctgagagactcttttaaagaatctgaggcggctatgaactctaaagttgtggatggtgtggttcagccatgtagggatatggcgggggaacaggggattgatgagttaggtgcagttgcaagagagatggttaggctcattgagactgcaactgttcctatattcgctgtggatgccggaggctgcatcaatggatggaacgctaagattgcagagttgacaggtctctcagttgaagaagctatggggaagtctctggtttctgatttaatatacaaagagaatgaagcaactgtcaataagcttctttctcgtgctttgagaggggacgaggaaaagaatgtggaggttaagctgaaaactttcagccccgaactacaagggaaagcagtttttgtggttgtgaatgcttgttccagcaaggactacttgaacaacattgtcggcgtttgttttgttggacaagacgttactagtcagaaaatcgtaatggataagttcatcaacatacaaggagattacaaggctattgtacatagcccaaaccctctaatcccgccaatttttgctgctgacgagaacacgtgctgcctggaatggaacatggcgatggaaaagcttacgggttggtctcgcagtgaagtgattgggaaaatgattgtcggggaagtgtttgggagctgttgcatgctaaagggtcctgatgctttaaccaagttcatgattgtattgcataatgcgattggtggccaagatacggataagttccctttcccattctttgaccgcaatgggaagtttgttcaggctctattgactgcaaacaagcgggttagcctcgagggaaaggttattggggctttctgtttcttgcaaatcccgagccctgagctgcagcaagctttagcagtccaacggaggcaggacacagagtgtttcacgaaggcaaaagagttggcttatatttgtcaggtgataaagaatcctttgagcggtatgcgtttcgcaaactcattgttggaggccacagacttgaacgaggaccagaagcagttacttgaaacaagtgtttcttgcgagaaacagatctcaaggatcgtcggggacatggatcttgaaagcattgaagacggttcatttgtgctaaagagggaagagtttttccttggaagtgtcataaacgcgattgtaagtcaagcgatgttcttattaagggacagaggtcttcagctgatccgtgacattcccgaagagatcaaatcaatagaggtttttggagaccagataaggattcaacagctcctggctgagtttctgctgagtataatccggtatgcaccatctcaagagtgggtggagatccatttaagccaactttcaaagcaaatggctgatggattcgccgccatccgcacagaattcagaatggcgtgtccaggtgaaggtctgcctccagagctagtccgagacatgttccatagcagcaggtggacaagccctgaaggtttaggtctaagcgtatgtcgaaagattttaaagctaatgaacggtgaggttcaatacatccgagaatcagaacggtcctatttcctcatcattctggaactccctgtacctcgaaagcgaccattgtcaactgctagtggaagtggtgacatgatgctgatgatgccatattagatggtttccggagtcgggggtagtggcggtggccgtggcggtggccgtggcggagaagaagaaccgtcgtcaagtcacactcctaataaccgaagaggaggagaacaagctcaatcgtcgggaacgaaatctctcagaccaagaagcaacactgaatcaatgagcaaagcaattcaacagtacaccgtcgacgcaagactccacgccgttttcgaacaatccggcgaatcagggaaatcattcgactactcacaatcactcaaaacgacgacgtacggttcctctgtacctgagcaacagatcacagcttatctctctcgaatccagcgaggtggttacattcagcctttcggatgtatgatcgccgtcgatgaatccagtttccggatcatcggttacagtgaaaacgccagagaaatgttagggattatgcctcaatctgttcctactcttgagaaacctgagattctagctatgggaactgatgtgagatctttgttcacttcttcgagctcgattctactcgagcgtgctttcgttgctcgagagattaccttgttaaatccggtttggatccattccaagaatactggtaaaccgttttacgccattcttcataggattgatgttggtgttgttattgatttagagccagctagaactgaagatcctgcgctttctattgctggtgctgttcaatcgcagaaactcgcggttcgtgcgatttctcagttacaggctcttcctggtggagatattaagcttttgtgtgacactgtcgtggaaagtgtgagggacttgactggttatgatcgtgttatggtttataagtttcatgaagatgagcatggagaagttgtagctgagagtaaacgagatgatttagagccttatattggactgcatgttcctgctactgatattcctcaagcgtcaaggttcttgtttaagcagaaccgtgtccgaatgatagtagattgcaatgccacacctgttcttgtggtccaggacgataggctaactcagtctatgtgcttggttggttctactcttagggctcctcatggttgtcactctcagtatatggctaacatgggatctattgcgtctttagcaatggcggttataatcaatggaaatgaagatgatgggagcaatgtagctagtggaagaagctcgatgaggctttggggtttggttgtttgccatcacacttcttctcgctgcataccgtttccgctaaggtatgcttgtgagtttttgatgcaggctttcggtttacagttaaacatggaattgcagttagctttgcaaatgtcagagaaacgcgttttgagaacgcagacactgttatgtgatatgcttctgcgtgactcgcctgctggaattgttacacagagtcccagtatcatggacttagtgaaatgtgacggtgcagcatttctttaccacgggaagtattacccgttgggtgttgctcctagtgaagttcagataaaagatgttgtggagtggttgcttgcgaatcatgcggattcaaccggattaagcactgatagtttaggcgatgcggggtatcccggtgcagctgcgttaggggatgctgtgtgcggtatggcagttgcatatatcacaaaaagagactttcttttttggtttcgatctcacactgcgaaagaaatcaaatggggaggcgctaagcatcatccggaggataaagatgatgggcaacgaatgcatcctcgttcgtcctttcaggcttttcttgaagttgttaagagccggagtcagccatgggaaactgcggaaatggatgcgattcactcgctccagcttattctgagagactcttttaaagaatctgaggcggctatgaactctaaagttgtggatggtgtggttcagccatgtagggatatggcgggggaacaggggattgatgagttaggtgcagttgcaagagagatggttaggctcattgagactgcaactgttcctatattcgctgtggatgccggaggctgcatcaatggatggaacgctaagattgcagagttgacaggtctctcagttgaagaagctatggggaagtctctggtttctgatttaatatacaaagagaatgaagcaactgtcaataagcttctttctcgtgctttgagaggggacgaggaaaagaatgtggaggttaagctgaaaactttcagccccgaactacaagggaaagcagtttttgtggttgtgaatgcttgttccagcaaggactacttgaacaacattgtcggcgtttgttttgttggacaagacgttactagtcagaaaatcgtaatggataagttcatcaacatacaaggagattacaaggctattgtacatagcccaaaccctctaatcccgccaatttttgctgctgacgagaacacgtgctgcctggaatggaacatggcgatggaaaagcttacgggttggtctcgcagtgaagtgattgggaaaatgattgtcggggaagtgtttgggagctgttgcatgctaaagggtcctgatgctttaaccaagttcatgattgtattgcataatgcgattggtggccaagatacggataagttccctttcccattctttgaccgcaatgggaagtttgttcaggctctattgactgcaaacaagcgggttagcctcgagggaaaggttattggggctttctgtttcttgcaaatcccgagccctgagctgcagcaagctttagcagtccaacggaggcaggacacagagtgtttcacgaaggcaaaagagttggcttatatttgtcaggtgataaagaatcctttgagcggtatgcgtttcgcaaactcattgttggaggccacagacttgaacgaggaccagaagcagttacttgaaacaagtgtttcttgcgagaaacagatctcaaggatcgtcggggacatggatcttgaaagcattgaagacggttcatttgtgctaaagagggaagagtttttccttggaagtgtcataaacgcgattgtaagtcaagcgatgttcttattaagggacagaggtcttcagctgatccgtgacattcccgaagagatcaaatcaatagaggtttttggagaccagataaggattcaacagctcctggctgagtttctgctgagtataatccggtatgcaccatctcaagagtgggtggagatccatttaagccaactttcaaagcaaatggctgatggattcgccgccatccgcacagaattcagaatggcgtgtccaggtgaaggtctgcctccagagctagtccgagacatgttccatagcagcaggtggacaagccctgaaggtttaggtctaagcgtatgtcgaaagattttaaagctaatgaacggtgaggttcaatacatccgagaatcagaacggtcctatttcctcatcattctggaactccctgtacctcgaaagcgaccattgtcaactgctagtggaagtggtgacatgatgctgatgatgccatattagatggtttccggagtcgggggtagtggcggtggccgtggcggtggccgtggcggagaagaagaaccgtcgtcaagtcacactcctaataaccgaagaggaggagaacaagctcaatcgtcgggaacgaaatctctcagaccaagaagcaacactgaatcaatgagcaaagcaattcaacagtacaccgtcgacgcaagactccacgccgttttcgaacaatccggcgaatcagggaaatcattcgactactcacaatcactcaaaacgacgacgtacggttcctctgtacctgagcaacagatcacagcttatctctctcgaatccagcgaggtggttacattcagcctttcggatgtatgatcgccgtcgatgaatccagtttccggatcatcggttacagtgaaaacgccagagaaatgttagggattatgcctcaatctgttcctactcttgagaaacctgagattctagctatgggaactgatgtgagatctttgttcacttcttcgagctcgattctactcgagcgtgctttcgttgctcgagagattaccttgttaaatccggtttggatccattccaagaatactggtaaaccgttttacgccattcttcataggattgatgttggtgttgttattgatttagagccagctagaactgaagatcctgcgctttctattgctggtgctgttcaatcgcagaaactcgcggttcgtgcgatttctcagttacaggctcttcctggtggagatattaagcttttgtgtgacactgtcgtggaaagtgtgagggacttgactggttatgatcgtgttatggtttataagtttcatgaagatgagcatggagaagttgtagctgagagtaaacgagatgatttagagccttatattggactgcatgttcctgctactgatattcctcaagcgtcaaggttcttgtttaagcagaaccgtgtccgaatgatagtagattgcaatgccacacctgttcttgtggtccaggacgataggctaactcagtctatgtgcttggttggttctactcttagggctcctcatggttgtcactctcagtatatggctaacatgggatctattgcgtctttagcaatggcggttataatcaatggaaatgaagatgatgggagcaatgtagctagtggaagaagctcgatgaggctttggggtttggttgtttgccatcacacttcttctcgctgcataccgtttccgctaaggtatgcttgtgagtttttgatgcaggctttcggtttacagttaaacatggaattgcagttagctttgcaaatgtcagagaaacgcgttttgagaacgcagacactgttatgtgatatgcttctgcgtgactcgcctgctggaattgttacacagagtcccagtatcatggacttagtgaaatgtgacggtgcagcatttctttaccacgggaagtattacccgttgggtgttgctcctagtgaagttcagataaaagatgttgtggagtggttgcttgcgaatcatgcggattcaaccggattaagcactgatagtttaggcgatgcggggtatcccggtgcagctgcgttaggggatgctgtgtgcggtatggcagttgcatatatcacaaaaagagactttcttttttggtttcgatctcacactgcgaaagaaatcaaatggggaggcgctaagcatcatccggaggataaagatgatgggcaacgaatgcatcctcgttcgtcctttcaggcttttcttgaagttgttaagagccggagtcagccatgggaaactgcggaaatggatgcgattcactcgctccagcttattctgagagactcttttaaagaatctgaggcggctatgaactctaaagttgtggatggtgtggttcagccatgtagggatatggcgggggaacaggggattgatgagttaggtgcagttgcaagagagatggttaggctcattgagactgcaactgttcctatattcgctgtggatgccggaggctgcatcaatggatggaacgctaagattgcagagttgacaggtctctcagttgaagaagctatggggaagtctctggtttctgatttaatatacaaagagaatgaagcaactgtcaataagcttctttctcgtgctttgagaggggacgaggaaaagaatgtggaggttaagctgaaaactttcagccccgaactacaagggaaagcagtttttgtggttgtgaatgcttgttccagcaaggactacttgaacaacattgtcggcgtttgttttgttggacaagacgttactagtcagaaaatcgtaatggataagttcatcaacatacaaggagattacaaggctattgtacatagcccaaaccctctaatcccgccaatttttgctgctgacgagaacacgtgctgcctggaatggaacatggcgatggaaaagcttacgggttggtctcgcagtgaagtgattgggaaaatgattgtcggggaagtgtttgggagctgttgcatgctaaagggtcctgatgctttaaccaagttcatgattgtattgcataatgcgattggtggccaagatacggataagttccctttcccattctttgaccgcaatgggaagtttgttcaggctctattgactgcaaacaagcgggttagcctcgagggaaaggttattggggctttctgtttcttgcaaatcccgagccctgagctgcagcaagctttagcagtccaacggaggcaggacacagagtgtttcacgaaggcaaaagagttggcttatatttgtcaggtgataaagaatcctttgagcggtatgcgtttcgcaaactcattgttggaggccacagacttgaacgaggaccagaagcagttacttgaaacaagtgtttcttgcgagaaacagatctcaaggatcgtcggggacatggatcttgaaagcattgaagacggttcatttgtgctaaagagggaagagtttttccttggaagtgtcataaacgcgattgtaagtcaagcgatgttcttattaagggacagaggtcttcagctgatccgtgacattcccgaagagatcaaatcaatagaggtttttggagaccagataaggattcaacagctcctggctgagtttctgctgagtataatccggtatgcaccatctcaagagtgggtggagatccatttaagccaactttcaaagcaaatggctgatggattcgccgccatccgcacagaattcagaatggcgtgtccaggtgaaggtctgcctccagagctagtccgagacatgttccatagcagcaggtggacaagccctgaaggtttaggtctaagcgtatgtcgaaagattttaaagctaatgaacggtgaggttcaatacatccgagaatcagaacggtcctatttcctcatcattctggaactccctgtacctcgaaagcgaccattgtcaactgctagtggaagtggtgacatgatgctgatgatgccatattagatggtttccggagtcgggggtagtggcggtggccgtggcggtggccgtggcggagaagaagaaccgtcgtcaagtcacactcctaataaccgaagaggaggagaacaagctcaatcgtcgggaacgaaatctctcagaccaagaagcaacactgaatcaatgagcaaagcaattcaacagtacaccgtcgacgcaagactccacgccgttttcgaacaatccggcgaatcagggaaatcattcgactactcacaatcactcaaaacgacgacgtacggttcctctgtacctgagcaacagatcacagcttatctctctcgaatccagcgaggtggttacattcagcctttcggatgtatgatcgccgtcgatgaatccagtttccggatcatcggttacagtgaaaacgccagagaaatgttagggattatgcctcaatctgttcctactcttgagaaacctgagattctagctatgggaactgatgtgagatctttgttcacttcttcgagctcgattctactcgagcgtgctttcgttgctcgagagattaccttgttaaatccggtttggatccattccaagaatactggtaaaccgttttacgccattcttcataggattgatgttggtgttgttattgatttagagccagctagaactgaagatcctgcgctttctattgctggtgctgttcaatcgcagaaactcgcggttcgtgcgatttctcagttacaggctcttcctggtggagatattaagcttttgtgtgacactgtcgtggaaagtgtgagggacttgactggttatgatcgtgttatggtttataagtttcatgaagatgagcatggagaagttgtagctgagagtaaacgagatgatttagagccttatattggactgcatgttcctgctactgatattcctcaagcgtcaaggttcttgtttaagcagaaccgtgtccgaatgatagtagattgcaatgccacacctgttcttgtggtccaggacgataggctaactcagtctatgtgcttggttggttctactcttagggctcctcatggttgtcactctcagtatatggctaacatgggatctattgcgtctttagcaatggcggttataatcaatggaaatgaagatgatgggagcaatgtagctagtggaagaagctcgatgaggctttggggtttggttgtttgccatcacacttcttctcgctgcataccgtttccgctaaggtatgcttgtgagtttttgatgcaggctttcggtttacagttaaacatggaattgcagttagctttgcaaatgtcagagaaacgcgttttgagaacgcagacactgttatgtgatatgcttctgcgtgactcgcctgctggaattgttacacagagtcccagtatcatggacttagtgaaatgtgacggtgcagcatttctttaccacgggaagtattacccgttgggtgttgctcctagtgaagttcagataaaagatgttgtggagtggttgcttgcgaatcatgcggattcaaccggattaagcactgatagtttaggcgatgcggggtatcccggtgcagctgcgttaggggatgctgtgtgcggtatggcagttgcatatatcacaaaaagagactttcttttttggtttcgatctcacactgcgaaagaaatcaaatggggaggcgctaagcatcatccggaggataaagatgatgggcaacgaatgcatcctcgttcgtcctttcaggcttttcttgaagttgttaagagccggagtcagccatgggaaactgcggaaatggatgcgattcactcgctccagcttattctgagagactcttttaaagaatctgaggcggctatgaactctaaagttgtggatggtgtggttcagccatgtagggatatggcgggggaacaggggattgatgagttaggtgcagttgcaagagagatggttaggctcattgagactgcaactgttcctatattcgctgtggatgccggaggctgcatcaatggatggaacgctaagattgcagagttgacaggtctctcagttgaagaagctatggggaagtctctggtttctgatttaatatacaaagagaatgaagcaactgtcaataagcttctttctcgtgctttgagaggggacgaggaaaagaatgtggaggttaagctgaaaactttcagccccgaactacaagggaaagcagtttttgtggttgtgaatgcttgttccagcaaggactacttgaacaacattgtcggcgtttgttttgttggacaagacgttactagtcagaaaatcgtaatggataagttcatcaacatacaaggagattacaaggctattgtacatagcccaaaccctctaatcccgccaatttttgctgctgacgagaacacgtgctgcctggaatggaacatggcgatggaaaagcttacgggttggtctcgcagtgaagtgattgggaaaatgattgtcggggaagtgtttgggagctgttgcatgctaaagggtcctgatgctttaaccaagttcatgattgtattgcataatgcgattggtggccaagatacggataagttccctttcccattctttgaccgcaatgggaagtttgttcaggctctattgactgcaaacaagcgggttagcctcgagggaaaggttattggggctttctgtttcttgcaaatcccgagccctgagctgcagcaagctttagcagtccaacggaggcaggacacagagtgtttcacgaaggcaaaagagttggcttatatttgtcaggtgataaagaatcctttgagcggtatgcgtttcgcaaactcattgttggaggccacagacttgaacgaggaccagaagcagttacttgaaacaagtgtttcttgcgagaaacagatctcaaggatcgtcggggacatggatcttgaaagcattgaagacggttcatttgtgctaaagagggaagagtttttccttggaagtgtcataaacgcgattgtaagtcaagcgatgttcttattaagggacagaggtcttcagctgatccgtgacattcccgaagagatcaaatcaatagaggtttttggagaccagataaggattcaacagctcctggctgagtttctgctgagtataatccggtatgcaccatctcaagagtgggtggagatccatttaagccaactttcaaagcaaatggctgatggattcgccgccatccgcacagaattcagaatggcgtgtccaggtgaaggtctgcctccagagctagtccgagacatgttccatagcagcaggtggacaagccctgaaggtttaggtctaagcgtatgtcgaaagattttaaagctaatgaacggtgaggttcaatacatccgagaatcagaacggtcctatttcctcatcattctggaactccctgtacctcgaaagcgaccattgtcaactgctagtggaagtggtgacatgatgctgatgatgccatattagatggtttccggagtcgggggtagtggcggtggccgtggcggtggccgtggcggagaagaagaaccgtcgtcaagtcacactcctaataaccgaagaggaggagaacaagctcaatcgtcgggaacgaaatctctcagaccaagaagcaacactgaatcaatgagcaaagcaattcaacagtacaccgtcgacgcaagactccacgccgttttcgaacaatccggcgaatcagggaaatcattcgactactcacaatcactcaaaacgacgacgtacggttcctctgtacctgagcaacagatcacagcttatctctctcgaatccagcgaggtggttacattcagcctttcggatgtatgatcgccgtcgatgaatccagtttccggatcatcggttacagtgaaaacgccagagaaatgttagggattatgcctcaatctgttcctactcttgagaaacctgagattctagctatgggaactgatgtgagatctttgttcacttcttcgagctcgattctactcgagcgtgctttcgttgctcgagagattaccttgttaaatccggtttggatccattccaagaatactggtaaaccgttttacgccattcttcataggattgatgttggtgttgttattgatttagagccagctagaactgaagatcctgcgctttctattgctggtgctgttcaatcgcagaaactcgcggttcgtgcgatttctcagttacaggctcttcctggtggagatattaagcttttgtgtgacactgtcgtggaaagtgtgagggacttgactggttatgatcgtgttatggtttataagtttcatgaagatgagcatggagaagttgtagctgagagtaaacgagatgatttagagccttatattggactgcatgttcctgctactgatattcctcaagcgtcaaggttcttgtttaagcagaaccgtgtccgaatgatagtagattgcaatgccacacctgttcttgtggtccaggacgataggctaactcagtctatgtgcttggttggttctactcttagggctcctcatggttgtcactctcagtatatggctaacatgggatctattgcgtctttagcaatggcggttataatcaatggaaatgaagatgatgggagcaatgtagctagtggaagaagctcgatgaggctttggggtttggttgtttgccatcacacttcttctcgctgcataccgtttccgctaaggtatgcttgtgagtttttgatgcaggctttcggtttacagttaaacatggaattgcagttagctttgcaaatgtcagagaaacgcgttttgagaacgcagacactgttatgtgatatgcttctgcgtgactcgcctgctggaattgttacacagagtcccagtatcatggacttagtgaaatgtgacggtgcagcatttctttaccacgggaagtattacccgttgggtgttgctcctagtgaagttcagataaaagatgttgtggagtggttgcttgcgaatcatgcggattcaaccggattaagcactgatagtttaggcgatgcggggtatcccggtgcagctgcgttaggggatgctgtgtgcggtatggcagttgcatatatcacaaaaagagactttcttttttggtttcgatctcacactgcgaaagaaatcaaatggggaggcgctaagcatcatccggaggataaagatgatgggcaacgaatgcatcctcgttcgtcctttcaggcttttcttgaagttgttaagagccggagtcagccatgggaaactgcggaaatggatgcgattcactcgctccagcttattctgagagactcttttaaagaatctgaggcggctatgaactctaaagttgtggatggtgtggttcagccatgtagggatatggcgggggaacaggggattgatgagttaggtgcagttgcaagagagatggttaggctcattgagactgcaactgttcctatattcgctgtggatgccggaggctgcatcaatggatggaacgctaagattgcagagttgacaggtctctcagttgaagaagctatggggaagtctctggtttctgatttaatatacaaagagaatgaagcaactgtcaataagcttctttctcgtgctttgagaggggacgaggaaaagaatgtggaggttaagctgaaaactttcagccccgaactacaagggaaagcagtttttgtggttgtgaatgcttgttccagcaaggactacttgaacaacattgtcggcgtttgttttgttggacaagacgttactagtcagaaaatcgtaatggataagttcatcaacatacaaggagattacaaggctattgtacatagcccaaaccctctaatcccgccaatttttgctgctgacgagaacacgtgctgcctggaatggaacatggcgatggaaaagcttacgggttggtctcgcagtgaagtgattgggaaaatgattgtcggggaagtgtttgggagctgttgcatgctaaagggtcctgatgctttaaccaagttcatgattgtattgcataatgcgattggtggccaagatacggataagttccctttcccattctttgaccgcaatgggaagtttgttcaggctctattgactgcaaacaagcgggttagcctcgagggaaaggttattggggctttctgtttcttgcaaatcccgagccctgagctgcagcaagctttagcagtccaacggaggcaggacacagagtgtttcacgaaggcaaaagagttggcttatatttgtcaggtgataaagaatcctttgagcggtatgcgtttcgcaaactcattgttggaggccacagacttgaacgaggaccagaagcagttacttgaaacaagtgtttcttgcgagaaacagatctcaaggatcgtcggggacatggatcttgaaagcattgaagacggttcatttgtgctaaagagggaagagtttttccttggaagtgtcataaacgcgattgtaagtcaagcgatgttcttattaagggacagaggtcttcagctgatccgtgacattcccgaagagatcaaatcaatagaggtttttggagaccagataaggattcaacagctcctggctgagtttctgctgagtataatccggtatgcaccatctcaagagtgggtggagatccatttaagccaactttcaaagcaaatggctgatggattcgccgccatccgcacagaattcagaatggcgtgtccaggtgaaggtctgcctccagagctagtccgagacatgttccatagcagcaggtggacaagccctgaaggtttaggtctaagcgtatgtcgaaagattttaaagctaatgaacggtgaggttcaatacatccgagaatcagaacggtcctatttcctcatcattctggaactccctgtacctcgaaagcgaccattgtcaactgctagtggaagtggtgacatgatgctgatgatgccatattagatggtttccggagtcgggggtagtggcggtggccgtggcggtggccgtggcggagaagaagaaccgtcgtcaagtcacactcctaataaccgaagaggaggagaacaagctcaatcgtcgggaacgaaatctctcagaccaagaagcaacactgaatcaatgagcaaagcaattcaacagtacaccgtcgacgcaagactccacgccgttttcgaacaatccggcgaatcagggaaatcattcgactactcacaatcactcaaaacgacgacgtacggttcctctgtacctgagcaacagatcacagcttatctctctcgaatccagcgaggtggttacattcagcctttcggatgtatgatcgccgtcgatgaatccagtttccggatcatcggttacagtgaaaacgccagagaaatgttagggattatgcctcaatctgttcctactcttgagaaacctgagattctagctatgggaactgatgtgagatctttgttcacttcttcgagctcgattctactcgagcgtgctttcgttgctcgagagattaccttgttaaatccggtttggatccattccaagaatactggtaaaccgttttacgccattcttcataggattgatgttggtgttgttattgatttagagccagctagaactgaagatcctgcgctttctattgctggtgctgttcaatcgcagaaactcgcggttcgtgcgatttctcagttacaggctcttcctggtggagatattaagcttttgtgtgacactgtcgtggaaagtgtgagggacttgactggttatgatcgtgttatggtttataagtttcatgaagatgagcatggagaagttgtagctgagagtaaacgagatgatttagagccttatattggactgcatgttcctgctactgatattcctcaagcgtcaaggttcttgtttaagcagaaccgtgtccgaatgatagtagattgcaatgccacacctgttcttgtggtccaggacgataggctaactcagtctatgtgcttggttggttctactcttagggctcctcatggttgtcactctcagtatatggctaacatgggatctattgcgtctttagcaatggcggttataatcaatggaaatgaagatgatgggagcaatgtagctagtggaagaagctcgatgaggctttggggtttggttgtttgccatcacacttcttctcgctgcataccgtttccgctaaggtatgcttgtgagtttttgatgcaggctttcggtttacagttaaacatggaattgcagttagctttgcaaatgtcagagaaacgcgttttgagaacgcagacactgttatgtgatatgcttctgcgtgactcgcctgctggaattgttacacagagtcccagtatcatggacttagtgaaatgtgacggtgcagcatttctttaccacgggaagtattacccgttgggtgttgctcctagtgaagttcagataaaagatgttgtggagtggttgcttgcgaatcatgcggattcaaccggattaagcactgatagtttaggcgatgcggggtatcccggtgcagctgcgttaggggatgctgtgtgcggtatggcagttgcatatatcacaaaaagagactttcttttttggtttcgatctcacactgcgaaagaaatcaaatggggaggcgctaagcatcatccggaggataaagatgatgggcaacgaatgcatcctcgttcgtcctttcaggcttttcttgaagttgttaagagccggagtcagccatgggaaactgcggaaatggatgcgattcactcgctccagcttattctgagagactcttttaaagaatctgaggcggctatgaactctaaagttgtggatggtgtggttcagccatgtagggatatggcgggggaacaggggattgatgagttaggtgcagttgcaagagagatggttaggctcattgagactgcaactgttcctatattcgctgtggatgccggaggctgcatcaatggatggaacgctaagattgcagagttgacaggtctctcagttgaagaagctatggggaagtctctggtttctgatttaatatacaaagagaatgaagcaactgtcaataagcttctttctcgtgctttgagaggggacgaggaaaagaatgtggaggttaagctgaaaactttcagccccgaactacaagggaaagcagtttttgtggttgtgaatgcttgttccagcaaggactacttgaacaacattgtcggcgtttgttttgttggacaagacgttactagtcagaaaatcgtaatggataagttcatcaacatacaaggagattacaaggctattgtacatagcccaaaccctctaatcccgccaatttttgctgctgacgagaacacgtgctgcctggaatggaacatggcgatggaaaagcttacgggttggtctcgcagtgaagtgattgggaaaatgattgtcggggaagtgtttgggagctgttgcatgctaaagggtcctgatgctttaaccaagttcatgattgtattgcataatgcgattggtggccaagatacggataagttccctttcccattctttgaccgcaatgggaagtttgttcaggctctattgactgcaaacaagcgggttagcctcgagggaaaggttattggggctttctgtttcttgcaaatcccgagccctgagctgcagcaagctttagcagtccaacggaggcaggacacagagtgtttcacgaaggcaaaagagttggcttatatttgtcaggtgataaagaatcctttgagcggtatgcgtttcgcaaactcattgttggaggccacagacttgaacgaggaccagaagcagttacttgaaacaagtgtttcttgcgagaaacagatctcaaggatcgtcggggacatggatcttgaaagcattgaagacggttcatttgtgctaaagagggaagagtttttccttggaagtgtcataaacgcgattgtaagtcaagcgatgttcttattaagggacagaggtcttcagctgatccgtgacattcccgaagagatcaaatcaatagaggtttttggagaccagataaggattcaacagctcctggctgagtttctgctgagtataatccggtatgcaccatctcaagagtgggtggagatccatttaagccaactttcaaagcaaatggctgatggattcgccgccatccgcacagaattcagaatggcgtgtccaggtgaaggtctgcctccagagctagtccgagacatgttccatagcagcaggtggacaagccctgaaggtttaggtctaagcgtatgtcgaaagattttaaagctaatgaacggtgaggttcaatacatccgagaatcagaacggtcctatttcctcatcattctggaactccctgtacctcgaaagcgaccattgtcaactgctagtggaagtggtgacatgatgctgatgatgccatattagatggtttccggagtcgggggtagtggcggtggccgtggcggtggccgtggcggagaagaagaaccgtcgtcaagtcacactcctaataaccgaagaggaggagaacaagctcaatcgtcgggaacgaaatctctcagaccaagaagcaacactgaatcaatgagcaaagcaattcaacagtacaccgtcgacgcaagactccacgccgttttcgaacaatccggcgaatcagggaaatcattcgactactcacaatcactcaaaacgacgacgtacggttcctctgtacctgagcaacagatcacagcttatctctctcgaatccagcgaggtggttacattcagcctttcggatgtatgatcgccgtcgatgaatccagtttccggatcatcggttacagtgaaaacgccagagaaatgttagggattatgcctcaatctgttcctactcttgagaaacctgagattctagctatgggaactgatgtgagatctttgttcacttcttcgagctcgattctactcgagcgtgctttcgttgctcgagagattaccttgttaaatccggtttggatccattccaagaatactggtaaaccgttttacgccattcttcataggattgatgttggtgttgttattgatttagagccagctagaactgaagatcctgcgctttctattgctggtgctgttcaatcgcagaaactcgcggttcgtgcgatttctcagttacaggctcttcctggtggagatattaagcttttgtgtgacactgtcgtggaaagtgtgagggacttgactggttatgatcgtgttatggtttataagtttcatgaagatgagcatggagaagttgtagctgagagtaaacgagatgatttagagccttatattggactgcatgttcctgctactgatattcctcaagcgtcaaggttcttgtttaagcagaaccgtgtccgaatgatagtagattgcaatgccacacctgttcttgtggtccaggacgataggctaactcagtctatgtgcttggttggttctactcttagggctcctcatggttgtcactctcagtatatggctaacatgggatctattgcgtctttagcaatggcggttataatcaatggaaatgaagatgatgggagcaatgtagctagtggaagaagctcgatgaggctttggggtttggttgtttgccatcacacttcttctcgctgcataccgtttccgctaaggtatgcttgtgagtttttgatgcaggctttcggtttacagttaaacatggaattgcagttagctttgcaaatgtcagagaaacgcgttttgagaacgcagacactgttatgtgatatgcttctgcgtgactcgcctgctggaattgttacacagagtcccagtatcatggacttagtgaaatgtgacggtgcagcatttctttaccacgggaagtattacccgttgggtgttgctcctagtgaagttcagataaaagatgttgtggagtggttgcttgcgaatcatgcggattcaaccggattaagcactgatagtttaggcgatgcggggtatcccggtgcagctgcgttaggggatgctgtgtgcggtatggcagttgcatatatcacaaaaagagactttcttttttggtttcgatctcacactgcgaaagaaatcaaatggggaggcgctaagcatcatccggaggataaagatgatgggcaacgaatgcatcctcgttcgtcctttcaggcttttcttgaagttgttaagagccggagtcagccatgggaaactgcggaaatggatgcgattcactcgctccagcttattctgagagactcttttaaagaatctgaggcggctatgaactctaaagttgtggatggtgtggttcagccatgtagggatatggcgggggaacaggggattgatgagttaggtgcagttgcaagagagatggttaggctcattgagactgcaactgttcctatattcgctgtggatgccggaggctgcatcaatggatggaacgctaagattgcagagttgacaggtctctcagttgaagaagctatggggaagtctctggtttctgatttaatatacaaagagaatgaagcaactgtcaataagcttctttctcgtgctttgagaggggacgaggaaaagaatgtggaggttaagctgaaaactttcagccccgaactacaagggaaagcagtttttgtggttgtgaatgcttgttccagcaaggactacttgaacaacattgtcggcgtttgttttgttggacaagacgttactagtcagaaaatcgtaatggataagttcatcaacatacaaggagattacaaggctattgtacatagcccaaaccctctaatcccgccaatttttgctgctgacgagaacacgtgctgcctggaatggaacatggcgatggaaaagcttacgggttggtctcgcagtgaagtgattgggaaaatgattgtcggggaagtgtttgggagctgttgcatgctaaagggtcctgatgctttaaccaagttcatgattgtattgcataatgcgattggtggccaagatacggataagttccctttcccattctttgaccgcaatgggaagtttgttcaggctctattgactgcaaacaagcgggttagcctcgagggaaaggttattggggctttctgtttcttgcaaatcccgagccctgagctgcagcaagctttagcagtccaacggaggcaggacacagagtgtttcacgaaggcaaaagagttggcttatatttgtcaggtgataaagaatcctttgagcggtatgcgtttcgcaaactcattgttggaggccacagacttgaacgaggaccagaagcagttacttgaaacaagtgtttcttgcgagaaacagatctcaaggatcgtcggggacatggatcttgaaagcattgaagacggttcatttgtgctaaagagggaagagtttttccttggaagtgtcataaacgcgattgtaagtcaagcgatgttcttattaagggacagaggtcttcagctgatccgtgacattcccgaagagatcaaatcaatagaggtttttggagaccagataaggattcaacagctcctggctgagtttctgctgagtataatccggtatgcaccatctcaagagtgggtggagatccatttaagccaactttcaaagcaaatggctgatggattcgccgccatccgcacagaattcagaatggcgtgtccaggtgaaggtctgcctccagagctagtccgagacatgttccatagcagcaggtggacaagccctgaaggtttaggtctaagcgtatgtcgaaagattttaaagctaatgaacggtgaggttcaatacatccgagaatcagaacggtcctatttcctcatcattctggaactccctgtacctcgaaagcgaccattgtcaactgctagtggaagtggtgacatgatgctgatgatgccatattagatggtttccggagtcgggggtagtggcggtggccgtggcggtggccgtggcggagaagaagaaccgtcgtcaagtcacactcctaataaccgaagaggaggagaacaagctcaatcgtcgggaacgaaatctctcagaccaagaagcaacactgaatcaatgagcaaagcaattcaacagtacaccgtcgacgcaagactccacgccgttttcgaacaatccggcgaatcagggaaatcattcgactactcacaatcactcaaaacgacgacgtacggttcctctgtacctgagcaacagatcacagcttatctctctcgaatccagcgaggtggttacattcagcctttcggatgtatgatcgccgtcgatgaatccagtttccggatcatcggttacagtgaaaacgccagagaaatgttagggattatgcctcaatctgttcctactcttgagaaacctgagattctagctatgggaactgatgtgagatctttgttcacttcttcgagctcgattctactcgagcgtgctttcgttgctcgagagattaccttgttaaatccggtttggatccattccaagaatactggtaaaccgttttacgccattcttcataggattgatgttggtgttgttattgatttagagccagctagaactgaagatcctgcgctttctattgctggtgctgttcaatcgcagaaactcgcggttcgtgcgatttctcagttacaggctcttcctggtggagatattaagcttttgtgtgacactgtcgtggaaagtgtgagggacttgactggttatgatcgtgttatggtttataagtttcatgaagatgagcatggagaagttgtagctgagagtaaacgagatgatttagagccttatattggactgcatgttcctgctactgatattcctcaagcgtcaaggttcttgtttaagcagaaccgtgtccgaatgatagtagattgcaatgccacacctgttcttgtggtccaggacgataggctaactcagtctatgtgcttggttggttctactcttagggctcctcatggttgtcactctcagtatatggctaacatgggatctattgcgtctttagcaatggcggttataatcaatggaaatgaagatgatgggagcaatgtagctagtggaagaagctcgatgaggctttggggtttggttgtttgccatcacacttcttctcgctgcataccgtttccgctaaggtatgcttgtgagtttttgatgcaggctttcggtttacagttaaacatggaattgcagttagctttgcaaatgtcagagaaacgcgttttgagaacgcagacactgttatgtgatatgcttctgcgtgactcgcctgctggaattgttacacagagtcccagtatcatggacttagtgaaatgtgacggtgcagcatttctttaccacgggaagtattacccgttgggtgttgctcctagtgaagttcagataaaagatgttgtggagtggttgcttgcgaatcatgcggattcaaccggattaagcactgatagtttaggcgatgcggggtatcccggtgcagctgcgttaggggatgctgtgtgcggtatggcagttgcatatatcacaaaaagagactttcttttttggtttcgatctcacactgcgaaagaaatcaaatggggaggcgctaagcatcatccggaggataaagatgatgggcaacgaatgcatcctcgttcgtcctttcaggcttttcttgaagttgttaagagccggagtcagccatgggaaactgcggaaatggatgcgattcactcgctccagcttattctgagagactcttttaaagaatctgaggcggctatgaactctaaagttgtggatggtgtggttcagccatgtagggatatggcgggggaacaggggattgatgagttaggtgcagttgcaagagagatggttaggctcattgagactgcaactgttcctatattcgctgtggatgccggaggctgcatcaatggatggaacgctaagattgcagagttgacaggtctctcagttgaagaagctatggggaagtctctggtttctgatttaatatacaaagagaatgaagcaactgtcaataagcttctttctcgtgctttgagaggggacgaggaaaagaatgtggaggttaagctgaaaactttcagccccgaactacaagggaaagcagtttttgtggttgtgaatgcttgttccagcaaggactacttgaacaacattgtcggcgtttgttttgttggacaagacgttactagtcagaaaatcgtaatggataagttcatcaacatacaaggagattacaaggctattgtacatagcccaaaccctctaatcccgccaatttttgctgctgacgagaacacgtgctgcctggaatggaacatggcgatggaaaagcttacgggttggtctcgcagtgaagtgattgggaaaatgattgtcggggaagtgtttgggagctgttgcatgctaaagggtcctgatgctttaaccaagttcatgattgtattgcataatgcgattggtggccaagatacggataagttccctttcccattctttgaccgcaatgggaagtttgttcaggctctattgactgcaaacaagcgggttagcctcgagggaaaggttattggggctttctgtttcttgcaaatcccgagccctgagctgcagcaagctttagcagtccaacggaggcaggacacagagtgtttcacgaaggcaaaagagttggcttatatttgtcaggtgataaagaatcctttgagcggtatgcgtttcgcaaactcattgttggaggccacagacttgaacgaggaccagaagcagttacttgaaacaagtgtttcttgcgagaaacagatctcaaggatcgtcggggacatggatcttgaaagcattgaagacggttcatttgtgctaaagagggaagagtttttccttggaagtgtcataaacgcgattgtaagtcaagcgatgttcttattaagggacagaggtcttcagctgatccgtgacattcccgaagagatcaaatcaatagaggtttttggagaccagataaggattcaacagctcctggctgagtttctgctgagtataatccggtatgcaccatctcaagagtgggtggagatccatttaagccaactttcaaagcaaatggctgatggattcgccgccatccgcacagaattcagaatggcgtgtccaggtgaaggtctgcctccagagctagtccgagacatgttccatagcagcaggtggacaagccctgaaggtttaggtctaagcgtatgtcgaaagattttaaagctaatgaacggtgaggttcaatacatccgagaatcagaacggtcctatttcctcatcattctggaactccctgtacctcgaaagcgaccattgtcaactgctagtggaagtggtgacatgatgctgatgatgccatattagatggtttccggagtcgggggtagtggcggtggccgtggcggtggccgtggcggagaagaagaaccgtcgtcaagtcacactcctaataaccgaagaggaggagaacaagctcaatcgtcgggaacgaaatctctcagaccaagaagcaacactgaatcaatgagcaaagcaattcaacagtacaccgtcgacgcaagactccacgccgttttcgaacaatccggcgaatcagggaaatcattcgactactcacaatcactcaaaacgacgacgtacggttcctctgtacctgagcaacagatcacagcttatctctctcgaatccagcgaggtggttacattcagcctttcggatgtatgatcgccgtcgatgaatccagtttccggatcatcggttacagtgaaaacgccagagaaatgttagggattatgcctcaatctgttcctactcttgagaaacctgagattctagctatgggaactgatgtgagatctttgttcacttcttcgagctcgattctactcgagcgtgctttcgttgctcgagagattaccttgttaaatccggtttggatccattccaagaatactggtaaaccgttttacgccattcttcataggattgatgttggtgttgttattgatttagagccagctagaactgaagatcctgcgctttctattgctggtgctgttcaatcgcagaaactcgcggttcgtgcgatttctcagttacaggctcttcctggtggagatattaagcttttgtgtgacactgtcgtggaaagtgtgagggacttgactggttatgatcgtgttatggtttataagtttcatgaagatgagcatggagaagttgtagctgagagtaaacgagatgatttagagccttatattggactgcatgttcctgctactgatattcctcaagcgtcaaggttcttgtttaagcagaaccgtgtccgaatgatagtagattgcaatgccacacctgttcttgtggtccaggacgataggctaactcagtctatgtgcttggttggttctactcttagggctcctcatggttgtcactctcagtatatggctaacatgggatctattgcgtctttagcaatggcggttataatcaatggaaatgaagatgatgggagcaatgtagctagtggaagaagctcgatgaggctttggggtttggttgtttgccatcacacttcttctcgctgcataccgtttccgctaaggtatgcttgtgagtttttgatgcaggctttcggtttacagttaaacatggaattgcagttagctttgcaaatgtcagagaaacgcgttttgagaacgcagacactgttatgtgatatgcttctgcgtgactcgcctgctggaattgttacacagagtcccagtatcatggacttagtgaaatgtgacggtgcagcatttctttaccacgggaagtattacccgttgggtgttgctcctagtgaagttcagataaaagatgttgtggagtggttgcttgcgaatcatgcggattcaaccggattaagcactgatagtttaggcgatgcggggtatcccggtgcagctgcgttaggggatgctgtgtgcggtatggcagttgcatatatcacaaaaagagactttcttttttggtttcgatctcacactgcgaaagaaatcaaatggggaggcgctaagcatcatccggaggataaagatgatgggcaacgaatgcatcctcgttcgtcctttcaggcttttcttgaagttgttaagagccggagtcagccatgggaaactgcggaaatggatgcgattcactcgctccagcttattctgagagactcttttaaagaatctgaggcggctatgaactctaaagttgtggatggtgtggttcagccatgtagggatatggcgggggaacaggggattgatgagttaggtgcagttgcaagagagatggttaggctcattgagactgcaactgttcctatattcgctgtggatgccggaggctgcatcaatggatggaacgctaagattgcagagttgacaggtctctcagttgaagaagctatggggaagtctctggtttctgatttaatatacaaagagaatgaagcaactgtcaataagcttctttctcgtgctttgagaggggacgaggaaaagaatgtggaggttaagctgaaaactttcagccccgaactacaagggaaagcagtttttgtggttgtgaatgcttgttccagcaaggactacttgaacaacattgtcggcgtttgttttgttggacaagacgttactagtcagaaaatcgtaatggataagttcatcaacatacaaggagattacaaggctattgtacatagcccaaaccctctaatcccgccaatttttgctgctgacgagaacacgtgctgcctggaatggaacatggcgatggaaaagcttacgggttggtctcgcagtgaagtgattgggaaaatgattgtcggggaagtgtttgggagctgttgcatgctaaagggtcctgatgctttaaccaagttcatgattgtattgcataatgcgattggtggccaagatacggataagttccctttcccattctttgaccgcaatgggaagtttgttcaggctctattgactgcaaacaagcgggttagcctcgagggaaaggttattggggctttctgtttcttgcaaatcccgagccctgagctgcagcaagctttagcagtccaacggaggcaggacacagagtgtttcacgaaggcaaaagagttggcttatatttgtcaggtgataaagaatcctttgagcggtatgcgtttcgcaaactcattgttggaggccacagacttgaacgaggaccagaagcagttacttgaaacaagtgtttcttgcgagaaacagatctcaaggatcgtcggggacatggatcttgaaagcattgaagacggttcatttgtgctaaagagggaagagtttttccttggaagtgtcataaacgcgattgtaagtcaagcgatgttcttattaagggacagaggtcttcagctgatccgtgacattcccgaagagatcaaatcaatagaggtttttggagaccagataaggattcaacagctcctggctgagtttctgctgagtataatccggtatgcaccatctcaagagtgggtggagatccatttaagccaactttcaaagcaaatggctgatggattcgccgccatccgcacagaattcagaatggcgtgtccaggtgaaggtctgcctccagagctagtccgagacatgttccatagcagcaggtggacaagccctgaaggtttaggtctaagcgtatgtcgaaagattttaaagctaatgaacggtgaggttcaatacatccgagaatcagaacggtcctatttcctcatcattctggaactccctgtacctcgaaagcgaccattgtcaactgctagtggaagtggtgacatgatgctgatgatgccatattagatggtttccggagtcgggggtagtggcggtggccgtggcggtggccgtggcggagaagaagaaccgtcgtcaagtcacactcctaataaccgaagaggaggagaacaagctcaatcgtcgggaacgaaatctctcagaccaagaagcaacactgaatcaatgagcaaagcaattcaacagtacaccgtcgacgcaagactccacgccgttttcgaacaatccggcgaatcagggaaatcattcgactactcacaatcactcaaaacgacgacgtacggttcctctgtacctgagcaacagatcacagcttatctctctcgaatccagcgaggtggttacattcagcctttcggatgtatgatcgccgtcgatgaatccagtttccggatcatcggttacagtgaaaacgccagagaaatgttagggattatgcctcaatctgttcctactcttgagaaacctgagattctagctatgggaactgatgtgagatctttgttcacttcttcgagctcgattctactcgagcgtgctttcgttgctcgagagattaccttgttaaatccggtttggatccattccaagaatactggtaaaccgttttacgccattcttcataggattgatgttggtgttgttattgatttagagccagctagaactgaagatcctgcgctttctattgctggtgctgttcaatcgcagaaactcgcggttcgtgcgatttctcagttacaggctcttcctggtggagatattaagcttttgtgtgacactgtcgtggaaagtgtgagggacttgactggttatgatcgtgttatggtttataagtttcatgaagatgagcatggagaagttgtagctgagagtaaacgagatgatttagagccttatattggactgcatgttcctgctactgatattcctcaagcgtcaaggttcttgtttaagcagaaccgtgtccgaatgatagtagattgcaatgccacacctgttcttgtggtccaggacgataggctaactcagtctatgtgcttggttggttctactcttagggctcctcatggttgtcactctcagtatatggctaacatgggatctattgcgtctttagcaatggcggttataatcaatggaaatgaagatgatgggagcaatgtagctagtggaagaagctcgatgaggctttggggtttggttgtttgccatcacacttcttctcgctgcataccgtttccgctaaggtatgcttgtgagtttttgatgcaggctttcggtttacagttaaacatggaattgcagttagctttgcaaatgtcagagaaacgcgttttgagaacgcagacactgttatgtgatatgcttctgcgtgactcgcctgctggaattgttacacagagtcccagtatcatggacttagtgaaatgtgacggtgcagcatttctttaccacgggaagtattacccgttgggtgttgctcctagtgaagttcagataaaagatgttgtggagtggttgcttgcgaatcatgcggattcaaccggattaagcactgatagtttaggcgatgcggggtatcccggtgcagctgcgttaggggatgctgtgtgcggtatggcagttgcatatatcacaaaaagagactttcttttttggtttcgatctcacactgcgaaagaaatcaaatggggaggcgctaagcatcatccggaggataaagatgatgggcaacgaatgcatcctcgttcgtcctttcaggcttttcttgaagttgttaagagccggagtcagccatgggaaactgcggaaatggatgcgattcactcgctccagcttattctgagagactcttttaaagaatctgaggcggctatgaactctaaagttgtggatggtgtggttcagccatgtagggatatggcgggggaacaggggattgatgagttaggtgcagttgcaagagagatggttaggctcattgagactgcaactgttcctatattcgctgtggatgccggaggctgcatcaatggatggaacgctaagattgcagagttgacaggtctctcagttgaagaagctatggggaagtctctggtttctgatttaatatacaaagagaatgaagcaactgtcaataagcttctttctcgtgctttgagaggggacgaggaaaagaatgtggaggttaagctgaaaactttcagccccgaactacaagggaaagcagtttttgtggttgtgaatgcttgttccagcaaggactacttgaacaacattgtcggcgtttgttttgttggacaagacgttactagtcagaaaatcgtaatggataagttcatcaacatacaaggagattacaaggctattgtacatagcccaaaccctctaatcccgccaatttttgctgctgacgagaacacgtgctgcctggaatggaacatggcgatggaaaagcttacgggttggtctcgcagtgaagtgattgggaaaatgattgtcggggaagtgtttgggagctgttgcatgctaaagggtcctgatgctttaaccaagttcatgattgtattgcataatgcgattggtggccaagatacggataagttccctttcccattctttgaccgcaatgggaagtttgttcaggctctattgactgcaaacaagcgggttagcctcgagggaaaggttattggggctttctgtttcttgcaaatcccgagccctgagctgcagcaagctttagcagtccaacggaggcaggacacagagtgtttcacgaaggcaaaagagttggcttatatttgtcaggtgataaagaatcctttgagcggtatgcgtttcgcaaactcattgttggaggccacagacttgaacgaggaccagaagcagttacttgaaacaagtgtttcttgcgagaaacagatctcaaggatcgtcggggacatggatcttgaaagcattgaagacggttcatttgtgctaaagagggaagagtttttccttggaagtgtcataaacgcgattgtaagtcaagcgatgttcttattaagggacagaggtcttcagctgatccgtgacattcccgaagagatcaaatcaatagaggtttttggagaccagataaggattcaacagctcctggctgagtttctgctgagtataatccggtatgcaccatctcaagagtgggtggagatccatttaagccaactttcaaagcaaatggctgatggattcgccgccatccgcacagaattcagaatggcgtgtccaggtgaaggtctgcctccagagctagtccgagacatgttccatagcagcaggtggacaagccctgaaggtttaggtctaagcgtatgtcgaaagattttaaagctaatgaacggtgaggttcaatacatccgagaatcagaacggtcctatttcctcatcattctggaactccctgtacctcgaaagcgaccattgtcaactgctagtggaagtggtgacatgatgctgatgatgccatattagatggtttccggagtcgggggtagtggcggtggccgtggcggtggccgtggcggagaagaagaaccgtcgtcaagtcacactcctaataaccgaagaggaggagaacaagctcaatcgtcgggaacgaaatctctcagaccaagaagcaacactgaatcaatgagcaaagcaattcaacagtacaccgtcgacgcaagactccacgccgttttcgaacaatccggcgaatcagggaaatcattcgactactcacaatcactcaaaacgacgacgtacggttcctctgtacctgagcaacagatcacagcttatctctctcgaatccagcgaggtggttacattcagcctttcggatgtatgatcgccgtcgatgaatccagtttccggatcatcggttacagtgaaaacgccagagaaatgttagggattatgcctcaatctgttcctactcttgagaaacctgagattctagctatgggaactgatgtgagatctttgttcacttcttcgagctcgattctactcgagcgtgctttcgttgctcgagagattaccttgttaaatccggtttggatccattccaagaatactggtaaaccgttttacgccattcttcataggattgatgttggtgttgttattgatttagagccagctagaactgaagatcctgcgctttctattgctggtgctgttcaatcgcagaaactcgcggttcgtgcgatttctcagttacaggctcttcctggtggagatattaagcttttgtgtgacactgtcgtggaaagtgtgagggacttgactggttatgatcgtgttatggtttataagtttcatgaagatgagcatggagaagttgtagctgagagtaaacgagatgatttagagccttatattggactgcatgttcctgctactgatattcctcaagcgtcaaggttcttgtttaagcagaaccgtgtccgaatgatagtagattgcaatgccacacctgttcttgtggtccaggacgataggctaactcagtctatgtgcttggttggttctactcttagggctcctcatggttgtcactctcagtatatggctaacatgggatctattgcgtctttagcaatggcggttataatcaatggaaatgaagatgatgggagcaatgtagctagtggaagaagctcgatgaggctttggggtttggttgtttgccatcacacttcttctcgctgcataccgtttccgctaaggtatgcttgtgagtttttgatgcaggctttcggtttacagttaaacatggaattgcagttagctttgcaaatgtcagagaaacgcgttttgagaacgcagacactgttatgtgatatgcttctgcgtgactcgcctgctggaattgttacacagagtcccagtatcatggacttagtgaaatgtgacggtgcagcatttctttaccacgggaagtattacccgttgggtgttgctcctagtgaagttcagataaaagatgttgtggagtggttgcttgcgaatcatgcggattcaaccggattaagcactgatagtttaggcgatgcggggtatcccggtgcagctgcgttaggggatgctgtgtgcggtatggcagttgcatatatcacaaaaagagactttcttttttggtttcgatctcacactgcgaaagaaatcaaatggggaggcgctaagcatcatccggaggataaagatgatgggcaacgaatgcatcctcgttcgtcctttcaggcttttcttgaagttgttaagagccggagtcagccatgggaaactgcggaaatggatgcgattcactcgctccagcttattctgagagactcttttaaagaatctgaggcggctatgaactctaaagttgtggatggtgtggttcagccatgtagggatatggcgggggaacaggggattgatgagttaggtgcagttgcaagagagatggttaggctcattgagactgcaactgttcctatattcgctgtggatgccggaggctgcatcaatggatggaacgctaagattgcagagttgacaggtctctcagttgaagaagctatggggaagtctctggtttctgatttaatatacaaagagaatgaagcaactgtcaataagcttctttctcgtgctttgagaggggacgaggaaaagaatgtggaggttaagctgaaaactttcagccccgaactacaagggaaagcagtttttgtggttgtgaatgcttgttccagcaaggactacttgaacaacattgtcggcgtttgttttgttggacaagacgttactagtcagaaaatcgtaatggataagttcatcaacatacaaggagattacaaggctattgtacatagcccaaaccctctaatcccgccaatttttgctgctgacgagaacacgtgctgcctggaatggaacatggcgatggaaaagcttacgggttggtctcgcagtgaagtgattgggaaaatgattgtcggggaagtgtttgggagctgttgcatgctaaagggtcctgatgctttaaccaagttcatgattgtattgcataatgcgattggtggccaagatacggataagttccctttcccattctttgaccgcaatgggaagtttgttcaggctctattgactgcaaacaagcgggttagcctcgagggaaaggttattggggctttctgtttcttgcaaatcccgagccctgagctgcagcaagctttagcagtccaacggaggcaggacacagagtgtttcacgaaggcaaaagagttggcttatatttgtcaggtgataaagaatcctttgagcggtatgcgtttcgcaaactcattgttggaggccacagacttgaacgaggaccagaagcagttacttgaaacaagtgtttcttgcgagaaacagatctcaaggatcgtcggggacatggatcttgaaagcattgaagacggttcatttgtgctaaagagggaagagtttttccttggaagtgtcataaacgcgattgtaagtcaagcgatgttcttattaagggacagaggtcttcagctgatccgtgacattcccgaagagatcaaatcaatagaggtttttggagaccagataaggattcaacagctcctggctgagtttctgctgagtataatccggtatgcaccatctcaagagtgggtggagatccatttaagccaactttcaaagcaaatggctgatggattcgccgccatccgcacagaattcagaatggcgtgtccaggtgaaggtctgcctccagagctagtccgagacatgttccatagcagcaggtggacaagccctgaaggtttaggtctaagcgtatgtcgaaagattttaaagctaatgaacggtgaggttcaatacatccgagaatcagaacggtcctatttcctcatcattctggaactccctgtacctcgaaagcgaccattgtcaactgctagtggaagtggtgacatgatgctgatgatgccatattag

SEQ ID NO: 12 - protein, 1172 aa, Arabidopsis thaliana
MVSGVGGSGGGRGGGRGGEEEPSSSHTPNNRRGGEQAQSSGTKSLRPRSNTESMSKAIQQYTVDARLHAVFEQSGESGKSFDYSQSLKTTTYGSSVPEQQITAYLSRIQRGGYIQPFGCMIAVDESSFRIIGYSENAREMLGIMPQSVPTLEKPEILAMGTDVRSLFTSSSSILLERAFVAREITLLNPVWIHSKNTGKPFYAILHRIDVGVVIDLEPARTEDPALSIAGAVQSQKLAVRAISQLQALPGGDIKLLCDTVVESVRDLTGYDRVMVYKFHEDEHGEVVAESKRDDLEPYIGLHVPATDIPQASRFLFKQNRVRMIVDCNATPVLVVQDDRLTQSMCLVGSTLRAPHGCHSQYMANMGSIASLAMAVIINGNEDDGSNVASGRSSMRLWGLVVCHHTSSRCIPFPLRYACEFLMQAFGLQLNMELQLALQMSEKRVLRTQTLLCDMLLRDSPAGIVTQSPSIMDLVKCDGAAFLYHGKYYPLGVAPSEVQIKDVVEWLLANHADSTGLSTDSLGDAGYPGAAALGDAVCGMAVAYITKRDFLFWFRSHTAKEIKWGGAKHHPEDKDDGQRMHPRSSFQAFLEVVKSRSQPWETAEMDAIHSLQLILRDSFKESEAAMNSKVVDGVVQPCRDMAGEQGIDELGAVAREMVRLIETATVPIFAVDAGGCINGWNAKIAELTGLSVEEAMGKSLVSDLIYKENEATVNKLLSRALRGDEEKNVEVKLKTFSPELQGKAVFVVVNACSSKDYLNNIVGVCFVGQDVTSQKIVMDKFINIQGDYKAIVHSPNPLIPPIFAADENTCCLEWNMAMEKLTGWSRSEVIGKMIVGEVFGSCCMLKGPDALTKFMIVLHNAIGGQDTDKFPFPFFDRNGKFVQALLTANKRVSLEGKVIGAFCFLQIPSPELQQALAVQRRQDTECFTKAKELAYICQVIKNPLSGMRFANSLLEATDLNEDQKQLLETSVSCEKQISRIVGDMDLESIEDGSFVLKREEFFLGSVINAIVSQAMFLLRDRGLQLIRDIPEEIKSIEVFGDQIRIQQLLAEFLLSIIRYAPSQEWVEIHLSQLSKQMADGFAAIRTEFRMACPGEGLPPELVRDMFHSSRWTSPEGLGLSVCRKILKLMNGEVQYIRESERSYFLIILELPVPRKRPLSTASGSGDMMLMMPY

SEQ ID NO: 13 - DNA, 1953 bp, Ocimum basilicum
  source 1..1953: mol_type = genomic DNA
atgaagaggggaaaagatgagggaaagattatggggcctatgtttccgaggctccatgtgaatgataccgagaaaggggggccaagagcccctcctagaaacaagatggctctttatgagcagctcagcattccttcacagagactcagtaattctgttagacccccgaattcggagcacgcttcggatcagggggctgcaaacgaaaggggtgcgtttttctcgtatcagctgcctaacagacataagtcagataagataagcagccaatattccgatttcagcgctccattcacgccacttggccggagaaagaaatccgatgaagaggaattcagagttcccgttttccaccattccatccaaaatcaagaatgcggtgattatgttaagaaggataaccccgtgcatgaaaaagtctccgcttccaacccctctagtctcaatcgtccgtcgaaattccataaattcaaaagccagacagacaagaattcaaaagagttcccctctgatcgaacaaaagttgtgtcaaattcatccatcatcgagaagcaaattgattcagctttttgtcgtgagccaacagattgtcaagctagtagtattggcagattacagacccgcgatatgagtgagccagagctacgtgctgattctgagcatgatgaaattaggcgtgctaactctgtggtaatgaagaattttccaaccttagatgaaagaaattctaaagaattgggaaatgatgaaggatctcagaaaagattggtaccaatgggagaccttgagagggctgacagtgtgtctgagatttcggttgtcgagtccattgctgggctcgatatgacacccgacgacgtggtgggaataattggtcagaaacatttttggaaggccagaaagaatattcttaatcaacaaagagtttttgctgttcaagtattcgagttgcatcgattggttaaggtccagagattgatcgctgcattgccacagttcttgctcgacaacacggccttcgtcgacaaaccaaacgctgcgcccggaccaaaagtcccatcggttagtcccctcaaagccgcgaatcccgaaattccaaagcgaaaaggcgaactccagaagccgagccataacaaggaaagctccgccgaaaacactgccgagaaaccatcgttctcgtccattcaaaacggcgagctcccgtctggctacgggccgttgacaggcaactctctgggccctcccgtttcgagcaatccaaataccgggcccgggccgtggtgcttcaaccaacctcaagggcaccaatggttgattcctgtgatgacaccttcagaaggactagtttacaagccatatcccgggccgggcttcgtgggcccagcctgcggcggctgtggcccacccgcgccaattccagcgtatggaatcccggccccacatcctcattatcagctcccatcgttcccgcacggctacttcccgacgtacggcatgccgatgatgaacacggccgcagtgtcgggctcgtccgtcgagcagacgaaccctcaacctgttcctagccaagcttcgggaggcggaaccggtgccagctttcaacatcatcagaacttgccttcgacaccaagccgcaagaatcgagcagatcctgacaggacgaatgcgtcgaagaactacgaacttgttgagactagcagaggaagtagccccgttgaaagattggtcgataatggaggaggaagcgatgacggggaaagagggaatatgctctcacttttcccaatggccccatcttccgatgagcctggttcgagcccagcctgtacgaagcccgatcggccgactcaagtggtcagggttgtgcctcataatgcaagatctgccactgaatctgctgcaaggatttttagatttatacaagaaggaagaaaacagtatgattctgtgtga

SEQ ID NO: 14 - DNA, 1701 bp, synthetic construct
  source 1..1701: mol_type = other DNA
atgaagagagggagagatgaggggaagattatggggccaatgtttccaaggctacatgtgaatgacactgagaaaggagggccaagagcccctcccagaaacaaaatggctctgtatgagcagctcaccatcccttcccacagactcaccgattccgcccagggtgtttcaactgatactggtgcaattttcccatacaagccgtctaacagacatcagtccgagaatctatgcggtcaatattccgatttcagtataccgtcgacgccagtcagctggagaaagaaatcggacgaagaggatttcagagttcccattttcaacgattctgtccgaagtcaagaacgtagaaaatgtggtaatgacccggtgcaggaaaaggtcaatcacccgtcgaaattccataaattcaaaaggacaggcatgcttgaaagtaacatgaggcaagaaggcaaaagccagacagaaaagaattcacaagcgcttgcattcgatcgagcaaaagctttatcaaactcatctagcatcgagaagcagaatggttcacctatatttcgtgaacggagagattgtcctgctaaaagtgtcgacagattacagacccgcgatgccattgagccgaagctccgtcctgattcagagcgtgctggaaacgggtgcactacctcgctgttggagaaggcttcggcaaccttagatgaaagaaactcttctgctccattcagagatcagagaaattcttgtgatttgggaaacaatcgcaaaaggtcagtggcggtgacaaatcttgatatggctgacagtgtgtcggagatctcgcttgtggagtccatcgccggaccggatatgacgcctgatgacgtggtgggaataatcggtccgaaacatttttggaaagccagaaaagccattctcaaccaacaaagagttttcgcgatccaagtattcgagttgcatcgactgataaaggtccagagatcgatcgccgaatcaccccagatgttggccgacaactcggttttcgtcgacaaaccagacttggctagtcccgtcaaacctattcccaatgcttccaagcgtacggccagccccatcaaagcatttcccgccgtttccaagaaaaaacccgaacccaaaaaggcgagtcagaacaaggaaagccccgtcgaaaaggcctctttttcgacgggccatggcgggccgtggtgcttcaaccagcctcaaggccaccaatggctgattcctgtgatgactccttcggagggactcgtgtataagccatatcccgggccgggcttcgttggcccgaatccgacaatgggcagtttcttgcctcctccgggatatggaatcccaccacactatcagggctgctacttttcgccgtatgcaatgtcggcggctgcagtgtcgggctcgtctgtcgagcagacgaaccctccccaatcaagcagagcaagtagccctgttgagagattggtggatagtggaggaagcaatgatatggaaagagggaatgtgctgccacttttccccgtggcgcccgactcaagcccggcccggtccaagcccgagtccgagcccgatcgccctgctcgggtgataagagttgtgcctcataatgcaacttcagcaactgaatctgctgcaagaattttcaggtctattcaagaggaaagaagacggtatgattctgtgtaa

SEQ ID NO: 15 - DNA, 300 bp, synthetic construct
  source 1..300: mol_type = other DNA
atgaagagagggagagatgaggggaagattatggggccaatgtttccaaggctacatgtgaatgacactgagaaaggagggccaagagcccctcccagaaacaaaatggctctgtatgagcagctcaccatcccttcccacagactcaccgattccgcccagacatcagtccgagaatctatgcggtcaatattccgatttcagtataccgtcgacgccagtcagctggagaaagaaatcggacgaagaggatttcagagttcccattttcaacgattctgtccgaagtcaagaacgtag

SEQ ID NO: 16 - DNA, 1423 bp, synthetic construct
  source 1..1423: mol_type = other DNA
atgaagagaaataatgaaggggagaagataatgggggccatgtttcctaggcttcatgtgaacgacaccgaaaagggggggccacgagcacccccgagaaacaagatggctttatacgagcagcttagcataccttcacacagactgaatcatgctgtgatgccccgaaacccgactaacaacgccactagcacggccccttcatcgagaatgggcggtggaaatcatcggggttcgttcagtgcttgtgtacggcgtcgtgcatatccatctcaggatcaatatacccaatattcagaatcgagcacttcaccaccaccacaagtagagccaagaaagaaaatctacgacaatgacaatagggttcctattttcatccagcccatacctcaagaatttgataaatacagcagtggctttctctccaatcctccatatttggaccctccattgaaatttcatcagaccaatgaaatgagcacgcttgaagttagtattggagatgaggggcaaatcaagaagagagaaaattcaaatgcagtgagctcggagaaggatgatactgcctctgaaacttcgattttggatacggaatcagccctcgaaataacgcccgatgatgttgtgggtgcaatggggcaagaacatttttggaaagccagaagagcaatcatgaatcagcaaagagtgtttgcagttcaagtattcgagttgcatagattgataaaggtccagagatcgatcgctgcatcgccacatcttttgcacgacgaagctgcttatctcgacgaccccacaaaaccattaccggcaaagaaacggccgctcgattgcactgataatgcggtcttgaacgctgagaacccgagacacaagaaggagcggtccgccaaaaacacggtcgagaaagagaaaacgcctctttcttcagctcgtccggcttcgaccgtcgtgagcactgattggagcaacgctcgaacatcatatttcaatgatcccctgccacacggacaccaatggttgattcctataatgtctccttcagaaggattagtatacaagccgtgttcgggccccggatttctcggcccgatagggttgaatccgacaacgatcggaaacttcgtagctcccgtatacggcctcccgccaccgtcgcatccgttcccacctttttacgggcctcattacagcatgccggttatgagctctgcagccttctcggcccgtgaatccacgttggatcggcctgccttgaaagccggaccgtgccaacgtgccacggaggagatcaaaagtggccatagtagggttagcaacggcattcttcaacgtttcccgatatcgtctccggccaccaccgatgcctcggaatcgagctgtcgcgttcgtgcggcggggcccggcccggcccgagggtgat

SEQ ID NO: 17 - DNA, 949 bp, synthetic construct
  source 1..949: mol_type = other DNA
atgaagagagggaatgatggggagaagataatgggccctatgttccctaggcttcatgtaaatgatgctgataagggcgggcccagagctcctccaaggaataagatggccttgtatgagcagctcagcattccttctcagagattcagtcatgccgtgccgccccataataggaataataacatggccacttcagtgcccaagtcgagcctgagcggtgggaacgataggggcgcgttcagtgctcggcaggtgcatcgagcatatccatatgagattgagaagcaatacagggactgctcggaattgagtgctccgctggcacaagtaaagcaaagaaagaaaatcgacgaagatgactatgcagttcctgttttcatccagcctaaaccttcagaattcgaaaactacagcaaggaaaaactctcaccctccaatcctccttatttgcacccttcgttgaaatctcagctctccaacgaaatagacacgctcgaaattagtatcggacgagaagggggaagcaagaagagagaaaattcagacgagtacgtgactgggagtaaagaaactgtttcctcaattagtcatgaatttggagcaaatctcgtcaacagcgtcgacatattaaggaatgatgacatggctgcggaaaaaagaaatccatctaatttaggggaagttctacaatcggaggatcagaatacagtccatgatcttagttatgagacggggtctgatgaagatgggtctttgcaagaagggaaattggaaaggcgagatagtgcctcggaaacatccgttttggatacggaatctgccatggaaataacgcccgacgacgttgtgggtacgataggccagaagcatttttggaaagccagaagagctatcatgaaaatattaattcctcatagtgaggaaatttatttcttcagccacctttgat

SEQ ID NO: 18 - DNA, 903 bp, synthetic construct
  source 1..903: mol_type = other DNA
atgaagagagggaatgatggggagaagataatgggccctatgttccctaggcttcatgtaaatgatgctgataagggcgggcccagagctcctccaaggaataagatggccttgtatgagcagctcagcattccttctcagagattcagtcatgccgtgccgccccataataggaataataacatggccacttcagtgcccaagtcgagcctgagcggtgggaacgataggggcgcgttcagtgctcggcaggtgcatcgagcatatccatatgagattgagaagcaatacagggactgctcggaattgagtgctccgctggcacaagtaaagcaaagaaagaaaatcgacgaagatgactatgcagttcctgttttcatccagcctaaaccttcagaattcgaaaactacagcaaggaaaaactctcaccctccaatcctccttatttgcacccttcgttgaaatctcagctctccaacgaaatagacacgctcgaaattagtatcggacgagaagggggaagcaagaagagagaaaattcagacgagtacgtgactgggagtaaagaaactgtttcctcaattagtcatgaatttggagcaaatctcgtcaacagcgtcgacatattaaggaatgatgacatggctgcggaaaaaagaaatccatctaatttaggggaagttctacaatcggaggatcagaatacagtccatgatcttagttatgagacggggtctgatgaagatgggtctttgcaagaagggaaattggaaaggcgagatagtgcctcggaaacatccgttttggatacggaatctgccatggaaataacgcccgacgacgttgtgggtacgataggccagaagcatttttggaaagccagaagagctatcatgaagtaa

SEQ ID NO: 19 - DNA, 13936 bp, synthetic construct
  source 1..13936: mol_type = other DNA
ggccctctagaggatccccgggtaccctcgaattatcatacatgagaattaagggagtcacgttatgacccccgccgatgacgcgggacaagccgttttacgtttggaactgacagaaccgcaacgttgaaggagccactcagccgcgggtttctggagtttaatgagctaagcacatacgtcagaaaccattattgcgcgttcaaaagtcgcctaaggtcactatcagctagcaaatatttcttgtcaaaaatgctccactgacgttccataaattcccctcggtatccaattagagtctcatattcactctcaactcgatcgaggcatgattgaacaagatggattgcacgcaggttctccggccgcttgggtggagaggctattcggctatgactgggcacaacagacaatcggctgctctgatgccgccgtgttccggctgtcagcgcaggggcgcccggttctttttgtcaagaccgacctgtccggtgccctgaatgaactccaagacgaggcagcgcggctatcgtggctggccacgacgggcgttccttgcgcagctgtgctcgacgttgtcactgaagcgggaagggactggctgctattgggcgaagtgccggggcaggatctcctgtcatctcaccttgctcctgccgagaaagtatccatcatggctgatgcaatgcggcggctgcatacgcttgatccggctacctgcccattcgaccaccaagcgaaacatcgcatcgagcgagcacgtactcggatggaagccggtcttgtcgatcaggatgatctggacgaagagcatcaggggctcgcgccagccgaactgttcgccaggctcaaggcgcggatgcccgacggcgaggatctcgtcgtgacccacggcgatgcctgcttgccgaatatcatggtggaaaatggccgcttttctggattcatcgactgtggccggctgggtgtggcggaccgctatcaggacatagcgttggctacccgtgatattgctgaagagcttggcggcgaatgggctgaccgcttcctcgtgctttacggtatcgccgctcccgattcgcagcgcatcgccttctatcgccttcttgacgagttcttctgagcgggactctggggttcggactctagctagagtcaagcagatcgttcaaacatttggcaataaagtttcttaagattgaatcctgttgccggtcttgcgatgattatcatataatttctgttgaattacgttaagcatgtaataattaacatgtaatgcatgacgttatttatgagatgggtttttatgattagagtcccgcaattatacatttaatacgcgatagaaaacaaaatatagcgcgcaaactaggataaattatcgcgcgcggtgtcatctatgttactagatcgaccggcatgcaagctgataattcaattcggcgttaattcagtacattaaaaacgtccgcaatgtgttattaagttgtctaagcgtcaatttgtttacaccacaatatatcctgccaccagccagccaacagctccccgaccggcagctcggcacaaaatcaccactcgatacaggcagcccatcagtccgggacggcgtcagcgggagagccgttgtaaggcggcagactttgctcatgttaccgatgctattcggaagaacggcaactaagctgccgggtttgaaacacggatgatctcgcggagggtagcatgttgattgtaacgatgacagagcgttgctgcctgtgatcaattcgggcacgaacccagtggacataagcctcgttcggttcgtaagctgtaatgcaagtagcgtaactgccgtcacgcaactggtccagaaccttgaccgaacgcagcggtggtaacggcgcagtggcggttttcatggcttcttgttatgacatgtttttttggggtacagtctatgcctcgggcatccaagcagcaagcgcgttacgccgtgggtcgatgtttgatgttatggagcagcaacgatgttacgcagcagggcagtcgccctaaaacaaagttaaacatcatgggggaagcggtgatcgccgaagtatcgactcaactatcagaggtagttggcgtcatcgagcgccatctcgaaccgacgttgctggccgtacatttgtacggctccgcagtggatggcggcctgaagccacacagtgatattgatttgctggttacggtgaccgtaaggcttgatgaaacaacgcggcgagctttgatcaacgaccttttggaaacttcggcttcccctggagagagcgagattctccgcgctgtagaagtcaccattgttgtgcacgacgacatcattccgtggcgttatccagctaagcgcgaactgcaatttggagaatggcagcgcaatgacattcttgcaggtatcttcgagccagccacgatcgacattgatctggctatcttgctgacaaaagcaagagaacatagcgttgccttggtaggtccagcggcggaggaactctttgatccggttcctgaacaggatctatttgaggcgctaaatgaaaccttaacgctatggaactcgccgcccgactgggctggcgatgagcgaaatgtagtgcttacgttgtcccgcatttggtacagcgcagtaaccggcaaaatcgcgccgaaggatgtcgctgccgactgggcaatggagcgcctgccggcccagtatcagcccgtcatacttgaagctagacaggcttatcttggacaagaagaagatcgcttggcctcgcgcgcagatcagttggaagaatttgtccactacgtgaaaggcgagatcaccaaggtagtcggcaaataatgtctagctagaaattcgttcaagccgacgccgcttcgccggcgttaactcaagcgattagatgcactaagcacataattgctcacagccaaactatcaggtcaagtctgcttttattatttttaagcgtgcataataagccctacacaaattgggagatatatcatgcatgaccaaaatcccttaacgtgagttttcgttccactgagcgtcagaccccgtagaaaagatcaaaggatcttcttgagatcctttttttctgcgcgtaatctgctgcttgcaaacaaaaaaaccaccgctaccagcggtggtttgtttgccggatcaagagctaccaactctttttccgaaggtaactggcttcagcagagcgcagataccaaatactgtccttctagtgtagccgtagttaggccaccacttcaagaactctgtagcaccgcctacatacctcgctctgctaatcctgttaccagtggctgctgccagtggcgataagtcgtgtcttaccgggttggactcaagacgatagttaccggataaggcgcagcggtcgggctgaacggggggttcgtgcacacagcccagcttggagcgaacgacctacaccgaactgagatacctacagcgtgagctatgagaaagcgccacgcttcccgaagggagaaaggcggacaggtatccggtaagcggcagggtcggaacaggagagcgcacgagggagcttccagggggaaacgcctggtatctttatagtcctgtcgggtttcgccacctctgacttgagcgtcgatttttgtgatgctcgtcaggggggcggagcctatggaaaaacgccagcaacgcggcctttttacggttcctggccttttgctggccttttgctcacatgttctttcctgcgttatcccctgattctgtggataaccgtattaccgcctttgagtgagctgataccgctcgccgcagccgaacgaccgagcgcagcgagtcagtgagcgaggaagcggaagagcgcctgatgcggtattttctccttacgcatctgtgcggtatttcacaccgcatatggtgcactctcagtacaatctgctctgatgccgcatagttaagccagtatacactccgctatcgctacgtgactgggtcatggctgcgccccgacacccgccaacacccgctgacgcgccctgacgggcttgtctgctcccggcatccgcttacagacaagctgtgaccgtctccgggagctgcatgtgtcagaggttttcaccgtcatcaccgaaacgcgcgaggcagggtgccttgatgtgggcgccggcggtcgagtggcgacggcgcggcttgtccgcgccctggtagattgcctggccgtaggccagccatttttgagcggccagcggccgcgataggccgacgcgaagcggcggggcgtagggagcgcagcgaccgaagggtaggcgctttttgcagctcttcggctgtgcgctggccagacagttatgcacaggccaggcgggttttaagagttttaataagttttaaagagttttaggcggaaaaatcgccttttttctcttttatatcagtcacttacatgtgtgaccggttcccaatgtacggctttgggttcccaatgtacgggttccggttcccaatgtacggctttgggttcccaatgtacgtgctatccacaggaaagagaccttttcgacctttttcccctgctagggcaatttgccctagcatctgctccgtacattaggaaccggcggatgcttcgccctcgatcaggttgcggtagcgcatgactaggatcgggccagcctgccccgcctcctccttcaaatcgtactccggcaggtcatttgacccgatcagcttgcgcacggtgaaacagaacttcttgaactctccggcgctgccactgcgttcgtagatcgtcttgaacaaccatctggcttctgccttgcctgcggcgcggcgtgccaggcggtagagaaaacggccgatgccgggatcgatcaaaaagtaatcggggtgaaccgtcagcacgtccgggttcttgccttctgtgatctcgcggtacatccaatcagctagctcgatctcgatgtactccggccgcccggtttcgctctttacgatcttgtagcggctaatcaaggcttcaccctcggataccgtcaccaggcggccgttcttggccttcttcgtacgctgcatggcaacgtgcgtggtgtttaaccgaatgcaggtttctaccaggtcgtctttctgctttccgccatcggctcgccggcagaacttgagtacgtccgcaacgtgtggacggaacacgcggccgggcttgtctcccttcccttcccggtatcggttcatggattcggttagatgggaaaccgccatcagtaccaggtcgtaatcccacacactggccatgccggccggccctgcggaaacctctacgtgcccgtctggaagctcgtagcggatcacctcgccagctcgtcggtcacgcttcgacagacggaaaacggccacgtccatgatgctgcgactatcgcgggtgcccacgtcatagagcatcggaacgaaaaaatctggttgctcgtcgcccttgggcggcttcctaatcgacggcgcaccggctgccggcggttgccgggattctttgcggattcgatcagcggccgcttgccacgattcaccggggcgtgcttctgcctcgatgcgttgccgctgggcggcctgcgcggccttcaacttctccaccaggtcatcacccagcgccgcgccgatttgtaccgggccggatggtttgcgaccgtcacgccgattcctcgggcttgggggttccagtgccattgcagggccggcagacaacccagccgcttacgcctggccaaccgcccgttcctccacacatggggcattccacggcgtcggtgcctggttgttcttgattttccatgccgcctcctttagccgctaaaattcatctactcatttattcatttgctcatttactctggtagctgcgcgatgtattcagatagcagctcggtaatggtcttgccttggcgtaccgcgtacatcttcagcttggtgtgatcctccgccggcaactgaaagttgacccgcttcatggctggcgtgtctgccaggctggccaacgttgcagccttgctgctgcgtgcgctcggacggccggcacttagcgtgtttgtgcttttgctcattttctctttacctcattaactcaaatgagttttgatttaatttcagcggccagcgcctggacctcgcgggcagcgtcgccctcgggttctgattcaagaacggttgtgccggcggcggcagtgcctgggtagctcacgcgctgcgtgatacgggactcaagaatgggcagctcgtacccggccagcgcctcggcaacctcaccgccgatgcgcgtgcctttgatcgcccgcgacacgacaaaggccgcttgtagccttccatccgtgacctcaatgcgctgcttaaccagctccaccaggtcggcggtggcccatatgtcgtaagggcttggctgcaccggaatcagcacgaagtcggctgccttgatcgcggacacagccaagtccgccgcctggggcgctccgtcgatcactacgaagtcgcgccggccgatggccttcacgtcgcggtcaatcgtcgggcggtcgatgccgacaacggttagcggttgatcttcccgcacggccgcccaatcgcgggcactgccctggggatcggaatcgactaacagaacatcggccccggcgagttgcagggcgcgggctagatgggttgcgatggtcgtcttgcctgacccgcctttctggttaagtacagcgataaccttcatgcgttccccttgcgtatttgtttatttactcatcgcatcatatacgcagcgaccgcatgacgcaagctgttttactcaaatacacatcacctttttagacggcggcgctcggtttcttcagcggccaagctggccggccaggccgccagcttggcatcagacaaaccggccaggatttcatgcagccgcacggttgagacgtgcgcgggcggctcgaacacgtacccggccgcgatcatctccgcctcgatctcttcggtaatgaaaaacggttcgtcctggccgtcctggtgcggtttcatgcttgttcctcttggcgttcattctcggcggccgccagggcgtcggcctcggtcaatgcgtcctcacggaaggcaccgcgccgcctggcctcggtgggcgtcacttcctcgctgcgctcaagtgcgcggtacagggtcgagcgatgcacgccaagcagtgcagccgcctctttcacggtgcggccttcctggtcgatcagctcgcgggcgtgcgcgatctgtgccggggtgagggtagggcgggggccaaacttcacgcctcgggccttggcggcctcgcgcccgctccgggtgcggtcgatgattagggaacgctcgaactcggcaatgccggcgaacacggtcaacaccatgcggccggccggcgtggtggtgtcggcccacggctctgccaggctacgcaggcccgcgccggcctcctggatgcgctcggcaatgtccagtaggtcgcgggtgctgcgggccaggcggtctagcctggtcactgtcacaacgtcgccagggcgtaggtggtcaagcatcctggccagctccgggcggtcgcgcctggtgccggtgatcttctcggaaaacagcttggtgcagccggccgcgtgcagttcggcccgttggttggtcaagtcctggtcgtcggtgctgacgcgggcatagcccagcaggccagcggcggcgctcttgttcatggcgtaatgtctccggttctagtcgcaagtattctactttatgcgactaaaacacgcgacaagaaaacgccaggaaaagggcagggcggcagcctgtcgcgtaacttaggacttgtgcgacatgtcgttttcagaagacggctgcactgaacgtcagaagccgactgcactatagcagcggaggggttggatcaaagtactttgatcccgaggggaaccctgtggttggcatgcacatacaaatggacgaacggataaaccttttcacgcccttttaaatatccgttattctaataaacgctcttttctcttaggtttacccgccaatatatcctgtcaaacactgatagtttaaactgaaggcgggaaacgacaatctgatccaagctcaagctaagcttgagctctcccatatggtcgactagagccaagctgatctcctttgccccggagatcaccatggacgactttctctatctctacgatctaggaagaaagttcgacggagaaggtgacgataccatgttcaccaccgataatgagaagattagcctcttcaatttcagaaagaatgctgacccacagatggttagagaggcctacgcggcaggtctcatcaagacgatctacccgagtaataatctccaggagatcaaataccttcccaagaaggttaaagatgcagtcaaaagattcaggactaactgcatcaagaacacagagaaagatatatttctcaagatcagaagtactattccagtatggacgattcaaggcttgcttcataaaccaaggcaagtaatagagattggagtctctaagaaagtagttcctactgaatcaaaggccatggagtcaaaaattcagatcgaggatctaacagaactcgccgtgaagactggcgaacagttcatacagagtcttttacgactcaatgacaagaagaaaatcttcgtcaacatggtggagcacgacactctcgtctactccaagaatatcaaagatacagtctcagaagaccaaagggctattgagacttttcaacaaagggtaatatcgggaaacctcctcggattccattgcccagctatctgtcacttcatcaaaaggacagtagaaaaggaaggtggcacctacaaatgccatcattgcgataaaggaaaggctatcgttcaagatgcctctgccgacagtggtcccaaagatggacccccacccacgaggagcatcgtggaaaaagaagacgttccaaccacgtcttcaaagcaagtggattgatgtgatatctccactgacgtaagggatgacgcacaatcccactatccttcgcaagacccttcctctatataaggaagttcatttcatttggagaggactccggtatttttacaacaataccacaacaaaacaaacaacaaacaacattacaatttactattctagtcgacctgcaggcggccgcactagtgatatcacaagtttgtacaaaaaagcaggctccgcggccgcccccttcaccatggtttccggagtcgggggtagtggcggtggccgtggcggtggccgtggcggagaagaagaaccgtcgtcaagtcacactcctaataaccgaagaggaggagaacaagctcaatcgtcgggaacgaaatctctcagaccaagaagcaacactgaatcaatgagcaaagcaattcaacagtacaccgtcgacgcaagactccacgccgttttcgaacaatccggcgaatcagggaaatcattcgactactcacaatcactcaaaacgacgacgtacggttcctctgtacctgagcaacagatcacagcttatctctctcgaatccagcgaggtggttacattcagcctttcggatgtatgatcgccgtcgatgaatccagtttccggatcatcggttacagtgaaaacgccagagaaatgttagggattatgcctcaatctgttcctactcttgagaaacctgagattctagctatgggaactgatgtgagatctttgttcacttcttcgagctcgattctactcgagcgtgctttcgttgctcgagagattaccttgttaaatccggtttggatccattccaagaatactggtaaaccgttttacgccattcttcataggattgatgttggtgttgttattgatttagagccagctagaactgaagatcctgcgctttctattgctggtgctgttcaatcgcagaaactcgcggttcgtgcgatttctcagttacaggctcttcctggtggagatattaagcttttgtgtgacactgtcgtggaaagtgtgagggacttgactggttatgatcgtgttatggttcataagtttcatgaagatgagcatggagaagttgtagctgagagtaaacgagatgatttagagccttatattggactgcattatcctgctactgatattcctcaagcgtcaaggttcttgtttaagcagaaccgtgtccgaatgatagtagattgcaatgccacacctgttcttgtggtccaggacgataggctaactcagtctatgtgcttggttggttctactcttagggctcctcatggttgtcactctcagtatatggctaacatgggatctattgcgtctttagcaatggcggttataatcaatggaaatgaagatgatgggagcaatgtagctagtggaagaagctcgatgaggctttggggtttggttgtttgccatcacacttcttctcgctgcataccgtttccgctaaggtatgcttgtgagtttttgatgcaggctttcggtttacagttaaacatggaattgcagttagctttgcaaatgtcagagaaacgcgttttgagaacgcagacactgttatgtgatatgcttctgcgtgactcgcctgctggaattgttacacagagtcccagtatcatggacttagtgaaatgtgacggtgcagcatttctttaccacgggaagtattacccgttgggtgttgctcctagtgaagttcagataaaagatgttgtggagtggttgcttgcgaatcatgcggattcaaccggattaagcactgatagtttaggcgatgcggggtatcccggtgcagctgcgttaggggatgctgtgtgcggtatggcagttgcatatatcacaaaaagagactttcttttttggtttcgatctcacactgcgaaagaaatcaaatggggaggcgctaagcatcatccggaggataaagatgatgggcaacgaatgcatcctcgttcgtcctttcaggcttttcttgaagttgttaagagccggagtcagccatgggaaactgcggaaatggatgcgattcactcgctccagcttattctgagagactcttttaaagaatctgaggcggctatgaactctaaagttgtggatggtgtggttcagccatgtagggatatggcgggggaacaggggattgatgagttaggtgcagttgcaagagagatggttaggctcattgagactgcaactgttcctatattcgctgtggatgccggaggctgcatcaatggatggaacgctaagattgcagagttgacaggtctctcagttgaagaagctatggggaagtctctggtttctgatttaatatacaaagagaatgaagcaactgtcaataagcttctttctcgtgctttgagaggggacgaggaaaagaatgtggaggttaagctgaaaactttcagccccgaactacaagggaaagcagtttttgtggttgtgaatgcttgttccagcaaggactacttgaacaacattgtcggcgtttgttttgttggacaagacgttactagtcagaaaatcgtaatggataagttcatcaacatacaaggagattacaaggctattgtacatagcccaaaccctctaatcccgccaatttttgctgctgacgagaacacgtgctgcctggaatggaacatggcgatggaaaagcttacgggttggtctcgcagtgaagtgattgggaaaatgattgtcggggaagtgtttgggagctgttgcatgctaaagggtcctgatgctttaaccaagttcatgattgtattgcataatgcgattggtggccaagatacggataagttccctttcccattctttgaccgcaatgggaagtttgttcaggctctattgactgcaaacaagcgggttagcctcgagggaaaggttattggggctttctgtttcttgcaaatcccgagccctgagctgcagcaagctttagcagtccaacggaggcaggacacagagtgtttcacgaaggcaaaagagttggcttatatttgtcaggtgataaagaatcctttgagcggtatgcgtttcgcaaactcattgttggaggccacagacttgaacgaggaccagaagcagttacttgaaacaagtgtttcttgcgagaaacagatctcaaggatcgtcggggacatggatcttgaaagcattgaagacggttcatttgtgctaaagagggaagagtttttccttggaagtgtcataaacgcgattgtaagtcaagcgatgttcttattaagggacagaggtcttcagctgatccgtgacattcccgaagagatcaaatcaatagaggtttttggagaccagataaggattcaacagctcctggctgagtttctgctgagtataatccggtatgcaccatctcaagagtgggtggagatccatttaagccaactttcaaagcaaatggctgatggattcgccgccatccgcacagaattcagaatggcgtgtccaggtgaaggtctgcctccagagctagtccgagacatgttccatagcagcaggtggacaagccctgaaggtttaggtctaagcgtatgtcgaaagattttaaagctaatgaacggtgaggttcaatacatccgagaatcagaacggtcctatttcctcatcattctggaactccctgtacctcgaaagcgaccattgtcaactgctagtggaagtggtgacatgatgctgatgatgccatataagggtgggcgcgccgacccagctttcttgtacaaagtggtgcgaatggtgaacaagggcgaggagctgttcaccggggtggtgcccatcctggtcgagctggacggcgacgtaaacggccacaagttcagcgtgtccggcgagggcgagggcgatgccacctacggcaagctgaccctgaagttcatctgcaccaccggcaagctgcccgtgccctggcccaccctcgtgaccaccctgacctggggcgtgcagtgcttcgcccgctaccccgaccacatgaagcagcacgacttcttcaagtccgccatgcccgaaggctacgtccaggagcgcaccatcttcttcaaggacgacggcaactacaagacccgcgccgaggtgaagttcgagggcgacaccctggtgaaccgcatcgagctgaagggcatcgacttcaaggaggacggcaacatcctggggcacaagctggagtacaacgccatcagcgacaacgtctatatcaccgccgacaagcagaagaacggcatcaaggccaacttcaagatccgccacaacatcgaggacggcagcgtgcagctcgccgaccactaccagcagaacacccccatcggcgacggccccgtgctgctgcccgacaaccactacctgagcacccagtccaagctgagcaaagaccccaacgagaagcgcgatcacatggtcctgctggagttcgtgaccgccgccgggatcactctcggcatggacgagctgtacaagtctaggggtggaagctggagccaccctcaatttgaaaagggaggaggatctggaggtggttctggtggtggttcttggtctcacccacaattcgaaaagggttcttacccatacgatgttccagattacgctcatcaccatcaccatcactagggtggtgatatcccgcggccatgctagagtccgcaaaaatcaccagtctctctctacaaatctatctctctctatttttctccagaataatgtgtgagtagttcccagataagggaattagggttcttatagggtttcgctcatgtgttgagcatataagaaacccttagtatgtatttgtatttgtaaaatacttctatcaataaaatttctaattcctaaaaccaaaatccagtgacctgcaggcatgcgacgtcg

SEQ ID NO: 20 - DNA, 1998 bp, Thlaspi arvense
  source 1..1998: mol_type = genomic DNA
atgaagagagggaaatatgaggagaagatacttgagccgatgtttcctcgacttcatgtgaacgatgctgataaaggagggcctagagctcctccaagaaacaagatggctctctatgagcaacttagcatcccttctcagaggtttagtagtgatcatggatcgttgcctcgtaacaccagcactttggttcctcctgttggatcatctagtcagccttgtagcgtggaaagaaacttatctgcccagcatcttgattcttcagctgcagtccatgcaactgagaagtttgtctcccaaatgtcgttcatggaaaatgtgagaattttggcacagcatgatcagaaaaaattagtaagagaggaggatgatttcgcagttccagtatttattaactcaagaagatttcagtctcatggcagaaccaagagaggtgttgagaaggaaagacacaccacattggtcaaggggagcgctaagcgaggtggctttgtaaactctgtggatgtatcagctacagaggaaatggatcttgaaaaatcatcatcgagttgtgacagagttaatgattgtaatgattccttgagagaggagtctagaaataggttaggccgagatggtggtgaaactcgagcgatggacactgataatggagttgaatctcacttgggatcagaatgtcattcagaagagggtcatgacaatcctaatgacgttgataatggtcgtgaatactgcacaagtagaggatatgtctctctgcagcagataaatgaagaggcgagcgatgatgtttctgatgattcgatggtggattctatatccagcatagatgtctctcctgatgacgttgtgggagtattaggtcaaaaacgtttctggagagcaaggaaagctattgccaatcaacaaagagtatttgctgttcaactatttgagttgcacagactgattaaggtacaaagacttattgctgcatcaccggatgtcttgctcgatgacatcagttatcttggaaaagtcgctgttaaaagctttccagtgaagaagctccttccatcagagaagcctcctctaccacaagttatcaaacacagcggccgcgactccgcggagaagaccgaccaacataaaatggaatgctcggctgagaacgtagtcgggaagatgtcaaaccaagttcatcatcaaccttccaactacatgccttttccgagcaaccaagccactgctaatggatgttactttcctccccagcctcctacttcaggaggaaatcagcaatggttaatccctgtaatgtctccttccgaaggtctgatatacaagccgcatccaggtccaggacacacaggacctccggtctgtggagggtattatggtcattacatgcctgctcctatggtaatgggtaatttcatgggcggtggtggtcaacctccgtttcacccggggatgggccttgcatctctgggtaatggctacttccctccttatggtataatgccacacaccatgatgaatacttattgctccggccaacaacaacaacaacaacccaatgagcatatgaatcagtttgggcattcagtaaatcttcagaacgcatcaggtttgaacaaccaacaacagagctcggttaacgaagaggcggcgcaacaacagccggcgaaatcatatcatcgggctagaaagagcaggcaagggagcacaggaagcagcagttcagagggaatctccggtaagaactcctttcggccattctcagcggttgatgaggacagcatcaacgaccaacctgagcaaatgatgacgacaacgacgaccacaacaagaacaactgttactcagacgacaagagatggagtaggaggagtgacgagagtgatcaaagtggttccacacaacgcgaagctggcgagtgagtatgctgcaaggattttccggtcaattcaagaagaacgtaaacactacgactccttctctaaccactcttaa

SEQ ID NO: 21 - protein, 665 aa, Thlaspi arvense
MKRGKYEEKILEPMFPRLHVNDADKGGPRAPPRNKMALYEQLSIPSQRFSSDHGSLPRNTSTLVPPVGSSSQPCSVERNLSAQHLDSSAAVHATEKFVSQMSFMENVRILAQHDQKKLVREEDDFAVPVFINSRRFQSHGRTKRGVEKERHTTLVKGSAKRGGFVNSVDVSATEEMDLEKSSSSCDRVNDCNDSLREESRNRLGRDGGETRAMDTDNGVESHLGSECHSEEGHDNPNDVDNGREYCTSRGYVSLQQINEEASDDVSDDSMVDSISSIDVSPDDVVGVLGQKRFWRARKAIANQQRVFAVQLFELHRLIKVQRLIAASPDVLLDDISYLGKVAVKSFPVKKLLPSEKPPLPQVIKHSGRDSAEKTDQHKMECSAENVVGKMSNQVHHQPSNYMPFPSNQATANGCYFPPQPPTSGGNQQWLIPVMSPSEGLIYKPHPGPGHTGPPVCGGYYGHYMPAPMVMGNFMGGGGQPPFHPGMGLASLGNGYFPPYGIMPHTMMNTYCSGQQQQQQPNEHMNQFGHSVNLQNASGLNNQQQSSVNEEAAQQQPAKSYHRARKSRQGSTGSSSSEGISGKNSFRPFSAVDEDSINDQPEQMMTTTTTTTRTTVTQTTRDGVGGVTRVIKVVPHNAKLASEYAARIFRSIQEERKHYDSFSNHS

SEQ ID NO: 22 - DNA, 615 bp, Thlaspi arvense
  source 1..615: mol_type = genomic DNA
agcgaggtggctttgtaaactctgtggatgtatcagctacagaggaaatggatcttgaaaaatcatcatcgagttgtgacagagttaatgattgtaatgattccttgagagaggagtctagaaataggttaggccgagatggtggtgaaactcgagcgatggacactgataatggagttgaatctcacttgggatcagaatgtcattcagaagagggtcatgacaatcctaatgacgttgataatggtcgtgaatactgcacaagtagaggatatgtctctctgcagcagataaatgaagaggcgagcgatgatgtttctgatgattcgatggtggattctatatccagcatagatgtctctcctgatgacgttgtgggagtattaggtcaaaaacgtttctggagagcaaggaaagctattgccaatcaacaaagagtatttgctgttcaactatttgagttgcacagactgattaaggtacaaagacttattgctgcatcaccggatgtcttgctcgatgacatcagttatcttggaaaagtcgctgttaaaagctttccagtgaagaagctccttccatcagagaagcctcctctaccacaagttatcaaac

SEQ ID NO: 23 - DNA, 1913 bp, synthetic construct
  source 1..1913: mol_type = other DNA
attgtatgaagagagggaatgatgttttagagctagaaatagcaagttaaaataaggctagtccgttatcaacttgaaaaagtggcaccgagtcggtgcttttttttgcaaaattttccagatcgatttcttcttcctctgttcttcggcgttcaatttctggggttttctcttcgttttctgtaactgaaacctaaaatttgacctaaaaaaaatctcaaataatatgattcagtggttttgtacttttcagttagttgagttttgcagttccgatgagataaaccaatattaatccaaactactgcagcctgacagacaaatgaggatgcaaacaattttaaagtttatctaacgctagctgttttgtttcttctctctggtgcaccaacgacggcgttttctcaatcataaagaggcttgttttacttaaggccaataatgttgatggatcgaaagaagagggcttttaataaacgagcccgtttaagctgtaaacgatgtcaaaaacatcccacatcgttcagttgaaaatagaagctctgtttatatattggtagagtcgactaagagattggcgttgttagtcgggtttcgttttagagctagaaatagcaagttaaaataaggctagtccgttatcaacttgaaaaagtggcaccgagtcggtgctttttttggatagaatttcccagcttttttgcgtgtttcagctctcatgatccttggccaatgggtgtagtaaattttctgcacattcattggatggaaaataatggttttagctttagggaataagaaaagtgtataggaaggggatttttgtacaatcacatttgaattaggtctttgaaatgacagggaatgaggacatatgatgagacggtcattgttttagttccaccacgattatatttgaaatttacgtgagtgtgagtgagacttgcataagaaaataaaatctttagttgggaaaaaattcaataatataaatgggcttgagaaggaagcgagggataggcctttttctaaaataggcccatttaagctattaacaatcttcaaaagtaccacagcgcttaggtaaagaaagcagctgagtttatatatggttagagacgaagtagtgattgaatcggtgagtctgtgggagttttagagctagaaatagcaagttaaaataaggctagtccgttatcaacttgaaaaagtggcaccgagtcggtgcttttttttggcaaaaattttcagattttttcttcatctgtagatttctgggtttttttttccgtttcgtgaatcataagtgaagttttggatgcaaatctgcgcgaaaaaagttggacctgcaatgagcttatttagatagctaagacaaagtgattggtccgttcgacttgccttccgcacaatacatcatttcttcttagctttttttcttcttcttcgttcatacagtttttttttgtttatcagcttacattttcttgaaccgtagctttcgttttcttctttttaactttccattcggagtttttgtatcttgtttcatagtttgtcccaggattagaatgattaggcatcgaaccttcaagaatttgattgaataaaacatcttcattcttaagatatgaagataatcttcaaaaggcccctgggaatctgaaagaagagaagcaggcccatttatatgggaaagaacaatagtatttcttatataggcccatttaagttgaaaacaatcttcaaaagtcccacatcgcttagataagaaaacgaagctgagtttatatacagctagagtcgaagtagtgattgacggacgattgagactagagttttagagctagaaatagcaagttaaaataaggctagtccgttatcaacttgaaaaagtggcaccgagtcggtgc

SEQ ID NO: 24 - DNA, 5531 bp, synthetic construct
  source 1..5531: mol_type = other DNA
gactagagccaagctgatctcctttgccccggagatcaccatggacgactttctctatctctacgatctaggaagaaagttcgacggagaaggtgacgataccatgttcaccaccgataatgagaagattagcctcttcaatttcagaaagaatgctgacccacagatggttagagaggcctacgcggcaggtctcatcaagacgatctacccgagtaataatctccaggagatcaaataccttcccaagaaggttaaagatgcagtcaaaagattcaggactaactgcatcaagaacacagagaaagatatatttctcaagatcagaagtactattccagtatggacgattcaaggcttgcttcataaaccaaggcaagtaatagagattggagtctctaagaaagtagttcctactgaatcaaaggccatggagtcaaaaattcagatcgaggatctaacagaactcgccgtgaagactggcgaacagttcatacagagtcttttacgactcaatgacaagaagaaaatcttcgtcaacatggtggagcacgacactctcgtctactccaagaatatcaaagatacagtctcagaagaccaaagggctattgagacttttcaacaaagggtaatatcgggaaacctcctcggattccattgcccagctatctgtcacttcatcaaaaggacagtagaaaaggaaggtggcacctacaaatgccatcattgcgataaaggaaaggctatcgttcaagatgcctctgccgacagtggtcccaaagatggacccccacccacgaggagcatcgtggaaaaagaagacgttccaaccacgtcttcaaagcaagtggattgatgtgatatctccactgacgtaagggatgacgcacaatcccactatccttcgcaagacccttcctctatataaggaagttcatttcatttggagaggactccggtatttttacaacaataccacaacaaaacaaacaacaaacaacattacaatttactattctagtcgacctgcaggcggccgcactagtgatatcacaagtttgtacaaaaaagcaggctccgcggccgcccccttcaccatggtttccggagtcgggggtagtggcggtggccgtggcggtggccgtggcggagaagaagaaccgtcgtcaagtcacactcctaataaccgaagaggaggagaacaagctcaatcgtcgggaacgaaatctctcagaccaagaagcaacactgaatcaatgagcaaagcaattcaacagtacaccgtcgacgcaagactccacgccgttttcgaacaatccggcgaatcagggaaatcattcgactactcacaatcactcaaaacgacgacgtacggttcctctgtacctgagcaacagatcacagcttatctctctcgaatccagcgaggtggttacattcagcctttcggatgtatgatcgccgtcgatgaatccagtttccggatcatcggttacagtgaaaacgccagagaaatgttagggattatgcctcaatctgttcctactcttgagaaacctgagattctagctatgggaactgatgtgagatctttgttcacttcttcgagctcgattctactcgagcgtgctttcgttgctcgagagattaccttgttaaatccggtttggatccattccaagaatactggtaaaccgttttacgccattcttcataggattgatgttggtgttgttattgatttagagccagctagaactgaagatcctgcgctttctattgctggtgctgttcaatcgcagaaactcgcggttcgtgcgatttctcagttacaggctcttcctggtggagatattaagcttttgtgtgacactgtcgtggaaagtgtgagggacttgactggttatgatcgtgttatggttcataagtttcatgaagatgagcatggagaagttgtagctgagagtaaacgagatgatttagagccttatattggactgcattatcctgctactgatattcctcaagcgtcaaggttcttgtttaagcagaaccgtgtccgaatgatagtagattgcaatgccacacctgttcttgtggtccaggacgataggctaactcagtctatgtgcttggttggttctactcttagggctcctcatggttgtcactctcagtatatggctaacatgggatctattgcgtctttagcaatggcggttataatcaatggaaatgaagatgatgggagcaatgtagctagtggaagaagctcgatgaggctttggggtttggttgtttgccatcacacttcttctcgctgcataccgtttccgctaaggtatgcttgtgagtttttgatgcaggctttcggtttacagttaaacatggaattgcagttagctttgcaaatgtcagagaaacgcgttttgagaacgcagacactgttatgtgatatgcttctgcgtgactcgcctgctggaattgttacacagagtcccagtatcatggacttagtgaaatgtgacggtgcagcatttctttaccacgggaagtattacccgttgggtgttgctcctagtgaagttcagataaaagatgttgtggagtggttgcttgcgaatcatgcggattcaaccggattaagcactgatagtttaggcgatgcggggtatcccggtgcagctgcgttaggggatgctgtgtgcggtatggcagttgcatatatcacaaaaagagactttcttttttggtttcgatctcacactgcgaaagaaatcaaatggggaggcgctaagcatcatccggaggataaagatgatgggcaacgaatgcatcctcgttcgtcctttcaggcttttcttgaagttgttaagagccggagtcagccatgggaaactgcggaaatggatgcgattcactcgctccagcttattctgagagactcttttaaagaatctgaggcggctatgaactctaaagttgtggatggtgtggttcagccatgtagggatatggcgggggaacaggggattgatgagttaggtgcagttgcaagagagatggttaggctcattgagactgcaactgttcctatattcgctgtggatgccggaggctgcatcaatggatggaacgctaagattgcagagttgacaggtctctcagttgaagaagctatggggaagtctctggtttctgatttaatatacaaagagaatgaagcaactgtcaataagcttctttctcgtgctttgagaggggacgaggaaaagaatgtggaggttaagctgaaaactttcagccccgaactacaagggaaagcagtttttgtggttgtgaatgcttgttccagcaaggactacttgaacaacattgtcggcgtttgttttgttggacaagacgttactagtcagaaaatcgtaatggataagttcatcaacatacaaggagattacaaggctattgtacatagcccaaaccctctaatcccgccaatttttgctgctgacgagaacacgtgctgcctggaatggaacatggcgatggaaaagcttacgggttggtctcgcagtgaagtgattgggaaaatgattgtcggggaagtgtttgggagctgttgcatgctaaagggtcctgatgctttaaccaagttcatgattgtattgcataatgcgattggtggccaagatacggataagttccctttcccattctttgaccgcaatgggaagtttgttcaggctctattgactgcaaacaagcgggttagcctcgagggaaaggttattggggctttctgtttcttgcaaatcccgagccctgagctgcagcaagctttagcagtccaacggaggcaggacacagagtgtttcacgaaggcaaaagagttggcttatatttgtcaggtgataaagaatcctttgagcggtatgcgtttcgcaaactcattgttggaggccacagacttgaacgaggaccagaagcagttacttgaaacaagtgtttcttgcgagaaacagatctcaaggatcgtcggggacatggatcttgaaagcattgaagacggttcatttgtgctaaagagggaagagtttttccttggaagtgtcataaacgcgattgtaagtcaagcgatgttcttattaagggacagaggtcttcagctgatccgtgacattcccgaagagatcaaatcaatagaggtttttggagaccagataaggattcaacagctcctggctgagtttctgctgagtataatccggtatgcaccatctcaagagtgggtggagatccatttaagccaactttcaaagcaaatggctgatggattcgccgccatccgcacagaattcagaatggcgtgtccaggtgaaggtctgcctccagagctagtccgagacatgttccatagcagcaggtggacaagccctgaaggtttaggtctaagcgtatgtcgaaagattttaaagctaatgaacggtgaggttcaatacatccgagaatcagaacggtcctatttcctcatcattctggaactccctgtacctcgaaagcgaccattgtcaactgctagtggaagtggtgacatgatgctgatgatgccatataagggtgggcgcgccgacccagctttcttgtacaaagtggtgcgaatggtgaacaagggcgaggagctgttcaccggggtggtgcccatcctggtcgagctggacggcgacgtaaacggccacaagttcagcgtgtccggcgagggcgagggcgatgccacctacggcaagctgaccctgaagttcatctgcaccaccggcaagctgcccgtgccctggcccaccctcgtgaccaccctgacctggggcgtgcagtgcttcgcccgctaccccgaccacatgaagcagcacgacttcttcaagtccgccatgcccgaaggctacgtccaggagcgcaccatcttcttcaaggacgacggcaactacaagacccgcgccgaggtgaagttcgagggcgacaccctggtgaaccgcatcgagctgaagggcatcgacttcaaggaggacggcaacatcctggggcacaagctggagtacaacgccatcagcgacaacgtctatatcaccgccgacaagcagaagaacggcatcaaggccaacttcaagatccgccacaacatcgaggacggcagcgtgcagctcgccgaccactaccagcagaacacccccatcggcgacggccccgtgctgctgcccgacaaccactacctgagcacccagtccaagctgagcaaagaccccaacgagaagcgcgatcacatggtcctgctggagttcgtgaccgccgccgggatcactctcggcatggacgagctgtacaagtctaggggtggaagctggagccaccctcaatttgaaaagggaggaggatctggaggtggttctggtggtggttcttggtctcacccacaattcgaaaagggttcttacccatacgatgttccagattacgctcatcaccatcaccatcactag

SEQ ID NO: 25 - DNA, 3534 bp, synthetic construct
  source 1..3534: mol_type = other DNA
atggtttccggaggtaacggcggtagtggccgcggacgtggtgaagaagcagcgtcgtcaagtcaccgtgccgaacgcagtctccacaccacaacttatcaccggagagaacaagctcaatcttctgggacgaaatcgcttaggccgcaaaatcagccgcagagccacactgaatcagtgagcaaagccattcaacagtacaccgtcgacgcgaggctccacgccgtcttcgaacagtctggcgagtccggcaagtcgtttgattactcacagtccctcaaaacgacgacgtacgggtcctctgtaccggagcagcagatcacggcgtatctctctaggatccagcgaggaggctacatccagcccttcggatgtatgatcgccgtcgatgaatccaccttcagaatcatcggctacagcgaaaacgcgcgggaaatgttaggccttactcctcagtccgttcctagcctcgagaaaccggagattctagcgatgggaacagatgtgcgctctctcttcacggcgtcgagctcaattctcctcgagcgtgctttcgtggctcgagaaatcacactgctgaatccggtttggatccactccaagaacaccggtaagcccttttacgcaattctccataggatcgacgttggagtcgttatcgatttagagccagctagaaccgaagatccggcgctttcgatcgccggagcagtccaatcgcagaagctcgcggttcgcgcgatttcacagttacagtcgcttcccggtggggacatcaagcttctctgcgacactgttgtggaaagcgtgagagacctcactggacacgaccgtgtaatggtctacaagtttcacgaagacgagcacggagaagttgtcgccgagagccggcgagaagatttagaaccttacatcggtctacattatccggcaactgatattcctcaagcgtcacggttcttattcaagcagaaccgtgtccgtatgatcgtagattgccacgccacaccggttcttgtggtccaggacgataggctcactcagtctatgtgcttggttggttctactctaagggctcctcacggatgtcactctcagtatatggctaacatgggatctattgcatctttagctatggcagttataataaacggcaacgaagaagacgggggcaatgtcggtggtgggagaaactcaatgaggctttggggtttagtcgtttgccatcacacctcttctcgctgcataccgtttcctctaaggtatgcttgcgagtttctaatgcaggcatttggtttacagttaaacatggaactgcagttagcattgcaaatgtcagagaaacgcgttttgagaacgcagacactgttatgcgatatgcttctgcgtgattctcctgctgggattgttacacagagtcctagtatcatggacttagtgaaatgtgacggtgcagcgtttctttaccatgggaagtactacccgttgggtgttgctccgacggaagttcaaataaaagacgttgtcgagtggttgcttgcgagtcatgcggattcgacagggttaagcacggatagtttaggcgatgcaggatatcccggtgcagctgcgttaggggatgctgtgtgcggtatggcggttgcgtatatcacaaaaagagactttcttttctggttccgttctcatactgccaaagaaatcaaatggggaggcgctaagcatcatccagaggacaaagatgatgggcaacggatgcatcctcgttcgtccttcaaggcttttcttgaagttgttaagagcaggagccagccatgggaaactgcagaaatggatgcgattcactcgctccagcttattctaagagactcttttaaagaatcagaggcagctatgaactctaaaaatgcagagggtgcggttcagccttgtagggatattgcgggaatgcaggggattgatgagttaggggcagttgcaagagagatggttaggctcattgaaaccgctactgttcctatatttgctgtggacgctggaggctgcattaatggatggaacgctaagatggcggaactgacaggtctctcggttgaagaagctatggggaagtctctggtttctgatctaatatacaaagagaacgaagaaactgttgataagctcatttctcgtgctctgagaggggacgaggacaagaatgtggaggtgaagctgaaaactttcatccccgaacttgaagggaatgcagtttttgtggttgtgaatgcgtgttcgagcaaggactacttgaacaacattgtcggcgtctgttttgtcggacaggatgtcactggtcagaaaatcgtaatggataagttcatcaacatacaaggagactacaaggccattgtccatagcccaaacgcgctgattccgccaatctttgcggcggacgagaacacgtgctgccttgagtggaacatcgcgatggaaaagctcacgggttggtcccgcagtgaagttattgggaaaatgcttgttggggaagtgtttggtagctgttgcaggctaaagggtcatgatgctttaaccaagttcatgattgcattgcataacgcgatgggtggccaagaaacggataagttccctttcccgttctttgaccgcaacgggaagtttgttcaggctctattgactgcaaacaagcgggttagcctcgacggaaaggttattggggctttctgcttcttgcagatcccgagtccggaactgcagcaagctttagcagtccaacggaggcaggacacagagtgtttcacgaaggcgaaagagctagcttacatttgtcaggtgataaagaaccctttgagtggtttgcgtttcacaaactcactgctggaagctacagacttgaacgaagatcagaaagagttccttgaaacgagtgtttcttgcgagaaacagatctcgaggatcgtcagtgacatggatcttgaaagaattgaagacggttcatttgagctagagagagcagagtttttcctcggaagtgtcataaacgcgatagtaagccaggcgatgttcttattaagggagagggctcttcagctgatccgtgacattcccgaagagataaaatctatagctgtttatggagaccagacaaggattcaacagatcctggctgagtttcttctgagtataatccggtatgcaccgtctcaagagtgggtggagatccatctaagccaagttccgaagcaaatggctgacggattctccgctatccgcacagagttcagaatggcgtgcccaggtgaaggtctgcctccagagctggtccgagacatgttccatagcagcaggtggacgagtcctgaagggttaggtctaagcgtgtgtcgaaagattctgaagctaatgaacggtgaggttcaatacatccgagagtcggaacggtcctatttcctcatcattctcgaactccctgttcctctgaaacgccctttttcaaccgctagcggcagcggcgacatgatgttgatgatgccatag

SEQ ID NO: 26 - protein, 1177 aa, Thlaspi arvense
MVSGGNGGSGRGRGEEAASSSHRAERSLHTTTYHRREQAQSSGTKSLRPQNQPQSHTESVSKAIQQYTVDARLHAVFEQSGESGKSFDYSQSLKTTTYGSSVPEQQITAYLSRIQRGGYIQPFGCMIAVDESTFRIIGYSENAREMLGLTPQSVPSLEKPEILAMGTDVRSLFTASSSILLERAFVAREITLLNPVWIHSKNTGKPFYAILHRIDVGVVIDLEPARTEDPALSIAGAVQSQKLAVRAISQLQSLPGGDIKLLCDTVVESVRDLTGHDRVMVYKFHEDEHGEVVAESRREDLEPYIGLHYPATDIPQASRFLFKQNRVRMIVDCHATPVLVVQDDRLTQSMCLVGSTLRAPHGCHSQYMANMGSIASLAMAVIINGNEEDGGNVGGGRNSMRLWGLVVCHHTSSRCIPFPLRYACEFLMQAFGLQLNMELQLALQMSEKRVLRTQTLLCDMLLRDSPAGIVTQSPSIMDLVKCDGAAFLYHGKYYPLGVAPTEVQIKDVVEWLLASHADSTGLSTDSLGDAGYPGAAALGDAVCGMAVAYITKRDFLFWFRSHTAKEIKWGGAKHHPEDKDDGQRMHPRSSFKAFLEVVKSRSQPWETAEMDAIHSLQLILRDSFKESEAAMNSKNAEGAVQPCRDIAGMQGIDELGAVAREMVRLIETATVPIFAVDAGGCINGWNAKMAELTGLSVEEAMGKSLVSDLIYKENEETVDKLISRALRGDEDKNVEVKLKTFIPELEGNAVFVVVNACSSKDYLNNIVGVCFVGQDVTGQKIVMDKFINIQGDYKAIVHSPNALIPPIFAADENTCCLEWNIAMEKLTGWSRSEVIGKMLVGEVFGSCCRLKGHDALTKFMIALHNAMGGQETDKFPFPFFDRNGKFVQALLTANKRVSLDGKVIGAFCFLQIPSPELQQALAVQRRQDTECFTKAKELAYICQVIKNPLSGLRFTNSLLEATDLNEDQKEFLETSVSCEKQISRIVSDMDLERIEDGSFELERAEFFLGSVINAIVSQAMFLLRERALQLIRDIPEEIKSIAVYGDQTRIQQILAEFLLSIIRYAPSQEWVEIHLSQVPKQMADGFSAIRTEFRMACPGEGLPPELVRDMFHSSRWTSPEGLGLSVCRKILKLMNGEVQYIRESERSYFLIILELPVPLKRPFSTASGSGDMMLMMP

SEQ ID NO: 27 - DNA, 3534 bp, Thlaspi arvense
  source 1..3534: mol_type = genomic DNA
atggtttccggaggtaacggcggtagtggccgcggacgtggtgaagaagcagcgtcgtcaagtcaccgtgccgaacgcagtctccacaccacaacttatcaccggagagaacaagctcaatcttctgggacgaaatcgcttaggccgcaaaatcagccgcagagccacactgaatcagtgagcaaagccattcaacagtacaccgtcgacgcgaggctccacgccgtcttcgaacagtctggcgagtccggcaagtcgtttgattactcacagtccctcaaaacgacgacgtacgggtcctctgtaccggagcagcagatcacggcgtatctctctaggatccagcgaggaggctacatccagcccttcggatgtatgatcgccgtcgatgaatccaccttcagaatcatcggctacagcgaaaacgcgcgggaaatgttaggccttactcctcagtccgttcctagcctcgagaaaccggagattctagcgatgggaacagatgtgcgctctctcttcacggcgtcgagctcaattctcctcgagcgtgctttcgtggctcgagaaatcacactgctgaatccggtttggatccactccaagaacaccggtaagcccttttacgcaattctccataggatcgacgttggagtcgttatcgatttagagccagctagaaccgaagatccggcgctttcgatcgccggagcagtccaatcgcagaagctcgcggttcgcgcgatttcacagttacagtcgcttcccggtggggacatcaagcttctctgcgacactgttgtggaaagcgtgagagacctcactggatacgaccgtgtaatggtctacaagtttcacgaagacgagcacggagaagttgtcgccgagagccggcgagaagatttagaaccttacatcggtctacattatccggcaactgatattcctcaagcgtcacggttcttattcaagcagaaccgtgtccgtatgatcgtagattgccacgccacaccggttcttgtggtccaggacgataggctcactcagtctatgtgcttggttggttctactctaagggctcctcacggatgtcactctcagtatatggctaacatgggatctattgcatctttagctatggcagttataataaacggcaacgaagaagacgggggcaatgtcggtggtgggagaaactcaatgaggctttggggtttagtcgtttgccatcacacctcttctcgctgcataccgtttcctctaaggtatgcttgcgagtttctaatgcaggcatttggtttacagttaaacatggaactgcagttagcattgcaaatgtcagagaaacgcgttttgagaacgcagacactgttatgcgatatgcttctgcgtgattctcctgctgggattgttacacagagtcctagtatcatggacttagtgaaatgtgacggtgcagcgtttctttaccatgggaagtactacccgttgggtgttgctccgacggaagttcaaataaaagacgttgtcgagtggttgcttgcgagtcatgcggattcgacagggttaagcacggatagtttaggcgatgcaggatatcccggtgcagctgcgttaggggatgctgtgtgcggtatggcggttgcgtatatcacaaaaagagactttcttttctggttccgttctcatactgccaaagaaatcaaatggggaggcgctaagcatcatccagaggacaaagatgatgggcaacggatgcatcctcgttcgtccttcaaggcttttcttgaagttgttaagagcaggagccagccatgggaaactgcagaaatggatgcgattcactcgctccagcttattctaagagactcttttaaagaatcagaggcagctatgaactctaaaaatgcagagggtgcggttcagccttgtagggatattgcgggaatgcaggggattgatgagttaggggcagttgcaagagagatggttaggctcattgaaaccgctactgttcctatatttgctgtggacgctggaggctgcattaatggatggaacgctaagatggcggaactgacaggtctctcggttgaagaagctatggggaagtctctggtttctgatctaatatacaaagagaacgaagaaactgttgataagctcatttctcgtgctctgagaggggacgaggacaagaatgtggaggtgaagctgaaaactttcatccccgaacttgaagggaatgcagtttttgtggttgtgaatgcgtgttcgagcaaggactacttgaacaacattgtcggcgtctgttttgtcggacaggatgtcactggtcagaaaatcgtaatggataagttcatcaacatacaaggagactacaaggccattgtccatagcccaaacgcgctgattccgccaatctttgcggcggacgagaacacgtgctgccttgagtggaacatcgcgatggaaaagctcacgggttggtcccgcagtgaagttattgggaaaatgcttgttggggaagtgtttggtagctgttgcaggctaaagggtcatgatgctttaaccaagttcatgattgcattgcataacgcgatgggtggccaagaaacggataagttccctttcccgttctttgaccgcaacgggaagtttgttcaggctctattgactgcaaacaagcgggttagcctcgacggaaaggttattggggctttctgcttcttgcagatcccgagtccggaactgcagcaagctttagcagtccaacggaggcaggacacagagtgtttcacgaaggcgaaagagctagcttacatttgtcaggtgataaagaaccctttgagtggtttgcgtttcacaaactcactgctggaagctacagacttgaacgaagatcagaaagagttccttgaaacgagtgtttcttgcgagaaacagatctcgaggatcgtcagtgacatggatcttgaaagaattgaagacggttcatttgagctagagagagcagagtttttcctcggaagtgtcataaacgcgatagtaagccaggcgatgttcttattaagggagagggctcttcagctgatccgtgacattcccgaagagataaaatctatagctgtttatggagaccagacaaggattcaacagatcctggctgagtttcttctgagtataatccggtatgcaccgtctcaagagtgggtggagatccatctaagccaagttccgaagcaaatggctgacggattctccgctatccgcacagagttcagaatggcgtgcccaggtgaaggtctgcctccagagctggtccgagacatgttccatagcagcaggtggacgagtcctgaagggttaggtctaagcgtgtgtcgaaagattctgaagctaatgaacggtgaggttcaatacatccgagagtcggaacggtcctatttcctcatcattctcgaactccctgttcctctgaaacgccctttttcaaccgctagcggcagcggcgacatgatgttgatgatgccatag

SEQ ID NO: 28 - protein, 1177 aa, Thlaspi arvense
MVSGGNGGSGRGRGEEAASSSHRAERSLHTTTYHRREQAQSSGTKSLRPQNQPQSHTESVSKAIQQYTVDARLHAVFEQSGESGKSFDYSQSLKTTTYGSSVPEQQITAYLSRIQRGGYIQPFGCMIAVDESTFRIIGYSENAREMLGLTPQSVPSLEKPEILAMGTDVRSLFTASSSILLERAFVAREITLLNPVWIHSKNTGKPFYAILHRIDVGVVIDLEPARTEDPALSIAGAVQSQKLAVRAISQLQSLPGGDIKLLCDTVVESVRDLTGYDRVMVYKFHEDEHGEVVAESRREDLEPYIGLHYPATDIPQASRFLFKQNRVRMIVDCHATPVLVVQDDRLTQSMCLVGSTLRAPHGCHSQYMANMGSIASLAMAVIINGNEEDGGNVGGGRNSMRLWGLVVCHHTSSRCIPFPLRYACEFLMQAFGLQLNMELQLALQMSEKRVLRTQTLLCDMLLRDSPAGIVTQSPSIMDLVKCDGAAFLYHGKYYPLGVAPTEVQIKDVVEWLLASHADSTGLSTDSLGDAGYPGAAALGDAVCGMAVAYITKRDFLFWFRSHTAKEIKWGGAKHHPEDKDDGQRMHPRSSFKAFLEVVKSRSQPWETAEMDAIHSLQLILRDSFKESEAAMNSKNAEGAVQPCRDIAGMQGIDELGAVAREMVRLIETATVPIFAVDAGGCINGWNAKMAELTGLSVEEAMGKSLVSDLIYKENEETVDKLISRALRGDEDKNVEVKLKTFIPELEGNAVFVVVNACSSKDYLNNIVGVCFVGQDVTGQKIVMDKFINIQGDYKAIVHSPNALIPPIFAADENTCCLEWNIAMEKLTGWSRSEVIGKMLVGEVFGSCCRLKGHDALTKFMIALHNAMGGQETDKFPFPFFDRNGKFVQALLTANKRVSLDGKVIGAFCFLQIPSPELQQALAVQRRQDTECFTKAKELAYICQVIKNPLSGLRFTNSLLEATDLNEDQKEFLETSVSCEKQISRIVSDMDLERIEDGSFELERAEFFLGSVINAIVSQAMFLLRERALQLIRDIPEEIKSIAVYGDQTRIQQILAEFLLSIIRYAPSQEWVEIHLSQVPKQMADGFSAIRTEFRMACPGEGLPPELVRDMFHSSRWTSPEGLGLSVCRKILKLMNGEVQYIRESERSYFLIILELPVPLKRPFSTASGSGDMMLMMP

SEQ ID NO: 29 - DNA, 4272 bp, synthetic construct
  source 1..4272: mol_type = other DNA
atggattacaaggaccacgacggggattacaaggaccacgacattgattacaaggatgatgatgacaagatggctccgaagaagaagaggaaggttggcatccacggggtgccagctgctgacaagaagtactcgatcggcctcgatattgggactaactctgttggctgggccgtgatcaccgacgagtacaaggtgccctcaaagaagttcaaggtcctgggcaacaccgatcggcattccatcaagaagaatctcattggcgctctcctgttcgacagcggcgagacggctgaggctacgcggctcaagcgcaccgcccgcaggcggtacacgcgcaggaagaatcgcatctgctacctgcaggagattttctccaacgagatggcgaaggttgacgattctttcttccacaggctggaggagtcattcctcgtggaggaggataagaagcacgagcggcatccaatcttcggcaacattgtcgacgaggttgcctaccacgagaagtaccctacgatctaccatctgcggaagaagctcgtggactccacagataaggcggacctccgcctgatctacctcgctctggcccacatgattaagttcaggggccatttcctgatcgagggggatctcaacccggacaatagcgatgttgacaagctgttcatccagctcgtgcagacgtacaaccagctcttcgaggagaaccccattaatgcgtcaggcgtcgacgcgaaggctatcctgtccgctaggctctcgaagtctcggcgcctcgagaacctgatcgcccagctgccgggcgagaagaagaacggcctgttcgggaatctcattgcgctcagcctggggctcacgcccaacttcaagtcgaatttcgatctcgctgaggacgccaagctgcagctctccaaggacacatacgacgatgacctggataacctcctggcccagatcggcgatcagtacgcggacctgttcctcgctgccaagaatctgtcggacgccatcctcctgtctgatattctcagggtgaacaccgagattacgaaggctccgctctcagcctccatgatcaagcgctacgacgagcaccatcaggatctgaccctcctgaaggcgctggtcaggcagcagctccccgagaagtacaaggagatcttcttcgatcagtcgaagaacggctacgctgggtacattgacggcggggcctctcaggaggagttctacaagttcatcaagccgattctggagaagatggacggcacggaggagctgctggtgaagctcaatcgcgaggacctcctgaggaagcagcggacattcgataacggcagcatcccacaccagattcatctcggggagctgcacgctatcctgaggaggcaggaggacttctaccctttcctcaaggataaccgcgagaagatcgagaagattctgactttcaggatcccgtactacgtcggcccactcgctaggggcaactcccgcttcgcttggatgacccgcaagtcagaggagacgatcacgccgtggaacttcgaggaggtggtcgacaagggcgctagcgctcagtcgttcatcgagaggatgacgaatttcgacaagaacctgccaaatgagaaggtgctccctaagcactcgctcctgtacgagtacttcacagtctacaacgagctgactaaggtgaagtatgtgaccgagggcatgaggaagccggctttcctgtctggggagcagaagaaggccatcgtggacctcctgttcaagaccaaccggaaggtcacggttaagcagctcaaggaggactacttcaagaagattgagtgcttcgattcggtcgagatctctggcgttgaggaccgcttcaacgcctccctggggacctaccacgatctcctgaagatcattaaggataaggacttcctggacaacgaggagaatgaggatatcctcgaggacattgtgctgacactcactctgttcgaggaccgggagatgatcgaggagcgcctgaagacttacgcccatctcttcgatgacaaggtcatgaagcagctcaagaggaggaggtacaccggctgggggaggctgagcaggaagctcatcaacggcattcgggacaagcagtccgggaagacgatcctcgacttcctgaagagcgatggcttcgcgaaccgcaatttcatgcagctgattcacgatgacagcctcacattcaaggaggatatccagaaggctcaggtgagcggccagggggactcgctgcacgagcatatcgcgaacctcgctggctcgccagctatcaagaaggggattctgcagaccgtgaaggttgtggacgagctggtgaaggtcatgggcaggcacaagcctgagaacatcgtcattgagatggcccgggagaatcagaccacgcagaagggccagaagaactcacgcgagaggatgaagaggatcgaggagggcattaaggagctggggtcccagatcctcaaggagcacccggtggagaacacgcagctgcagaatgagaagctctacctgtactacctccagaatggccgcgatatgtatgtggaccaggagctggatattaacaggctcagcgattacgacgtcgatcatatcgttccacagtcattcctgaaggatgactccattgacaacaaggtcctcaccaggtcggacaagaaccggggcaagtctgataatgttccttcagaggaggtcgttaagaagatgaagaactactggcgccagctcctgaatgccaagctgatcacgcagcggaagttcgataacctcacaaaggctgagaggggcgggctctctgagctggacaaggcgggcttcatcaagaggcagctggtcgagacacggcagatcactaagcacgttgcgcagattctcgactcacggatgaacactaagtacgatgagaatgacaagctgatccgcgaggtgaaggtcatcaccctgaagtcaaagctcgtctccgacttcaggaaggatttccagttctacaaggttcgggagatcaacaattaccaccatgcccatgacgcgtacctgaacgcggtggtcggcacagctctgatcaagaagtacccaaagctcgagagcgagttcgtgtacggggactacaaggtttacgatgtgaggaagatgatcgccaagtcggagcaggagattggcaaggctaccgccaagtacttcttctactctaacattatgaatttcttcaagacagagatcactctggccaatggcgagatccggaagcgccccctcatcgagacgaacggcgagacgggggagatcgtgtgggacaagggcagggatttcgcgaccgtcaggaaggttctctccatgccacaagtgaatatcgtcaagaagacagaggtccagactggcgggttctctaaggagtcaattctgcctaagcggaacagcgacaagctcatcgcccgcaagaaggactgggatccgaagaagtacggcgggttcgacagccccactgtggcctactcggtcctggttgtggcgaaggttgagaagggcaagtccaagaagctcaagagcgtgaaggagctgctggggatcacgattatggagcgctccagcttcgagaagaacccgatcgatttcctggaggcgaagggctacaaggaggtgaagaaggacctgatcattaagctccccaagtactcactcttcgagctggagaacggcaggaagcggatgctggcttccgctggcgagctgcagaaggggaacgagctggctctgccgtccaagtatgtgaacttcctctacctggcctcccactacgagaagctcaagggcagccccgaggacaacgagcagaagcagctgttcgtcgagcagcacaagcattacctcgacgagatcattgagcagatttccgagttctccaagcgcgtgatcctggccgacgcgaatctggataaggtcctctccgcgtacaacaagcaccgcgacaagccaatcagggagcaggctgagaatatcattcatctcttcaccctgacgaacctcggcgcccctgctgctttcaagtacttcgacacaactatcgatcgcaagaggtacacaagcactaaggaggtcctggacgcgaccctcatccaccagtcgattaccggcctctacgagacgcgcatcgacctgtctcagctcgggggcgacaagcggccagcggcgacgaagaaggcggggcaggcgaagaagaagaagtga

SEQ ID NO: 30 - DNA, 20 bp, synthetic construct
  source 1..20: mol_type = other DNA
gtcaaggggagcgctaagcg

SEQ ID NO: 31 - DNA, 20 bp, synthetic construct
  source 1..20: mol_type = other DNA
ccacaagttatcaaacacag

SEQ ID NO: 32 - DNA, 16485 bp, synthetic construct
  source 1..16485: mol_type = other DNA
gtttacccgccaatatatcctgtcaaacactgatagtttaaactgaaggcgggaaacgacaatctgatccaagctcaagctgctctagcattcgccattcaggctgcgcaactgttgggaagggcgatcggtgcgggcctcttcgctattacgccagctggcgaaagggggatgtgctgcaaggcgattaagttgggtaacgccagggttttcccagtcacgacgttgtaaaacgacggccagtgccaagcttcgacttgccttccgcacaatacatcatttcttcttagctttttttcttcttcttcgttcatacagtttttttttgtttatcagcttacattttcttgaaccgtagctttcgttttcttctttttaactttccattcggagtttttgtatcttgtttcatagtttgtcccaggattagaatgattaggcatcgaaccttcaagaatttgattgaataaaacatcttcattcttaagatatgaagataatcttcaaaaggcccctgggaatctgaaagaagagaagcaggcccatttatatgggaaagaacaatagtatttcttatataggcccatttaagttgaaaacaatcttcaaaagtcccacatcgcttagataagaaaacgaagctgagtttatatacagctagagtcgaagtagtgattggtcaaggggagcgctaagcggttttagagctagaaatagcaagttaaaataaggctagtccgttatcaacttgaaaaagtggcaccgagtcggtgcttttttttgcaaaattttccagatcgatttcttcttcctctgttcttcggcgttcaatttctggggttttctcttcgttttctgtaactgaaacctaaaatttgacctaaaaaaaatctcaaataatatgattcagtggttttgtacttttcagttagttgagttttgcagttccgatgagataaaccaatattaatccaaactactgcagcctgacagacaaatgaggatgcaaacaattttaaagtttatctaacgctagctgttttgtttcttctctctggtgcaccaacgacggcgttttctcaatcataaagaggcttgttttacttaaggccaataatgttgatggatcgaaagaagagggcttttaataaacgagcccgtttaagctgtaaacgatgtcaaaaacatcccacatcgttcagttgaaaatagaagctctgtttatatattggtagagtcgactaagagattgccacaagttatcaaacacaggttttagagctagaaatagcaagttaaaataaggctagtccgttatcaacttgaaaaagtggcaccgagtcggtgcttttttttgcaaaattttccagatcgatttcttcttcctctgttcttcggcgttcaatttctggggttttctcttcgttttctgtaactgaaacctaaaatttgacctaaaaaaaatctcaaataatatgattcagtggttttgtacttttcagttagttgagttttgcagttccgatgagataaaccaataccatggttatactagtgaataaaagcatttgcgtttggtttatcattgcgtttatacaaggacagagatccactgagctggaatagcttaaaaccattatcagaacaaaataaaccattttttgttaagaatcagagcatagtaaacaacagaaacaacctaagagaggtaacttgtccaagaagatagctaattatatctattttataaaagttatcatagtttgtaagtcacaaaagatgcaaataacagagaaactaggagacttgagaatatacattcttgtatatttgtattcgagattgtgaaaatttgaccataagtttaaattcttaaaaagatatatctgatctaggtgatggttatagactgtaattttaccacatgtttaatgatggatagtgacacacatgacacatcgacaacactatagcatcttatttagattacaacatgaaatttttctgtaatacatgtctttgtacataatttaaaagtaattcctaagaaatatatttatacaaggagtttaaagaaaacatagcataaagttcaatgagtagtaaaaaccatatacagtatatagcataaagttcaatgagtttattacaaaagcattggttcactttctgtaacacgacgttaaaccttcgtctccaataggagcgctactgattcaacatgccaatatatactaaatacgtttctacagtcaaatgctttaacgtttcatgattaagtgactatttaccgtcaatcctttcccattcctcccactaatccaactttttaattactcttaaatcaccactaagctagtaacgcctatcatgaattagctctactaaatctagcaacctttcaaatttgcagtattgcaggtgtctctgtgtctttaaaatagttgccttatgatttcttcggtttcaagatgatcaaatagttatagatttcatgctcacacatgctcattagatgtgtacatactttacttacccaaatctattttctcgcaaagattttgatggtaaagctgatttggttctattgaactaaatcaaacgagtttcagactgagtgattctaatccggcccattagcccctaaacagacccactaattacgcagcttttaatagagtaattacacctagtttacccactaaaccactaagcactaattatctcacaatctaatgagcttccctcgtaattacttgggctttcactctaccatttatttgtaacagtcaagtctctactgtctctatataaactctctaaagttaacacacaattctcatcacaaacaaatcaaccaaagcaacttctactctttcttctttcgaccttatcaatctgttgagaaatctagatggattacaaggaccacgacggggattacaaggaccacgacattgattacaaggatgatgatgacaagatggctccgaagaagaagaggaaggttggcatccacggggtgccagctgctgacaagaagtactcgatcggcctcgatattgggactaactctgttggctgggccgtgatcaccgacgagtacaaggtgccctcaaagaagttcaaggtcctgggcaacaccgatcggcattccatcaagaagaatctcattggcgctctcctgttcgacagcggcgagacggctgaggctacgcggctcaagcgcaccgcccgcaggcggtacacgcgcaggaagaatcgcatctgctacctgcaggagattttctccaacgagatggcgaaggttgacgattctttcttccacaggctggaggagtcattcctcgtggaggaggataagaagcacgagcggcatccaatcttcggcaacattgtcgacgaggttgcctaccacgagaagtaccctacgatctaccatctgcggaagaagctcgtggactccacagataaggcggacctccgcctgatctacctcgctctggcccacatgattaagttcaggggccatttcctgatcgagggggatctcaacccggacaatagcgatgttgacaagctgttcatccagctcgtgcagacgtacaaccagctcttcgaggagaaccccattaatgcgtcaggcgtcgacgcgaaggctatcctgtccgctaggctctcgaagtctcggcgcctcgagaacctgatcgcccagctgccgggcgagaagaagaacggcctgttcgggaatctcattgcgctcagcctggggctcacgcccaacttcaagtcgaatttcgatctcgctgaggacgccaagctgcagctctccaaggacacatacgacgatgacctggataacctcctggcccagatcggcgatcagtacgcggacctgttcctcgctgccaagaatctgtcggacgccatcctcctgtctgatattctcagggtgaacaccgagattacgaaggctccgctctcagcctccatgatcaagcgctacgacgagcaccatcaggatctgaccctcctgaaggcgctggtcaggcagcagctccccgagaagtacaaggagatcttcttcgatcagtcgaagaacggctacgctgggtacattgacggcggggcctctcaggaggagttctacaagttcatcaagccgattctggagaagatggacggcacggaggagctgctggtgaagctcaatcgcgaggacctcctgaggaagcagcggacattcgataacggcagcatcccacaccagattcatctcggggagctgcacgctatcctgaggaggcaggaggacttctaccctttcctcaaggataaccgcgagaagatcgagaagattctgactttcaggatcccgtactacgtcggcccactcgctaggggcaactcccgcttcgcttggatgacccgcaagtcagaggagacgatcacgccgtggaacttcgaggaggtggtcgacaagggcgctagcgctcagtcgttcatcgagaggatgacgaatttcgacaagaacctgccaaatgagaaggtgctccctaagcactcgctcctgtacgagtacttcacagtctacaacgagctgactaaggtgaagtatgtgaccgagggcatgaggaagccggctttcctgtctggggagcagaagaaggccatcgtggacctcctgttcaagaccaaccggaaggtcacggttaagcagctcaaggaggactacttcaagaagattgagtgcttcgattcggtcgagatctctggcgttgaggaccgcttcaacgcctccctggggacctaccacgatctcctgaagatcattaaggataaggacttcctggacaacgaggagaatgaggatatcctcgaggacattgtgctgacactcactctgttcgaggaccgggagatgatcgaggagcgcctgaagacttacgcccatctcttcgatgacaaggtcatgaagcagctcaagaggaggaggtacaccggctgggggaggctgagcaggaagctcatcaacggcattcgggacaagcagtccgggaagacgatcctcgacttcctgaagagcgatggcttcgcgaaccgcaatttcatgcagctgattcacgatgacagcctcacattcaaggaggatatccagaaggctcaggtgagcggccagggggactcgctgcacgagcatatcgcgaacctcgctggctcgccagctatcaagaaggggattctgcagaccgtgaaggttgtggacgagctggtgaaggtcatgggcaggcacaagcctgagaacatcgtcattgagatggcccgggagaatcagaccacgcagaagggccagaagaactcacgcgagaggatgaagaggatcgaggagggcattaaggagctggggtcccagatcctcaaggagcacccggtggagaacacgcagctgcagaatgagaagctctacctgtactacctccagaatggccgcgatatgtatgtggaccaggagctggatattaacaggctcagcgattacgacgtcgatcatatcgttccacagtcattcctgaaggatgactccattgacaacaaggtcctcaccaggtcggacaagaaccggggcaagtctgataatgttccttcagaggaggtcgttaagaagatgaagaactactggcgccagctcctgaatgccaagctgatcacgcagcggaagttcgataacctcacaaaggctgagaggggcgggctctctgagctggacaaggcgggcttcatcaagaggcagctggtcgagacacggcagatcactaagcacgttgcgcagattctcgactcacggatgaacactaagtacgatgagaatgacaagctgatccgcgaggtgaaggtcatcaccctgaagtcaaagctcgtctccgacttcaggaaggatttccagttctacaaggttcgggagatcaacaattaccaccatgcccatgacgcgtacctgaacgcggtggtcggcacagctctgatcaagaagtacccaaagctcgagagcgagttcgtgtacggggactacaaggtttacgatgtgaggaagatgatcgccaagtcggagcaggagattggcaaggctaccgccaagtacttcttctactctaacattatgaatttcttcaagacagagatcactctggccaatggcgagatccggaagcgccccctcatcgagacgaacggcgagacgggggagatcgtgtgggacaagggcagggatttcgcgaccgtcaggaaggttctctccatgccacaagtgaatatcgtcaagaagacagaggtccagactggcgggttctctaaggagtcaattctgcctaagcggaacagcgacaagctcatcgcccgcaagaaggactgggatccgaagaagtacggcgggttcgacagccccactgtggcctactcggtcctggttgtggcgaaggttgagaagggcaagtccaagaagctcaagagcgtgaaggagctgctggggatcacgattatggagcgctccagcttcgagaagaacccgatcgatttcctggaggcgaagggctacaaggaggtgaagaaggacctgatcattaagctccccaagtactcactcttcgagctggagaacggcaggaagcggatgctggcttccgctggcgagctgcagaaggggaacgagctggctctgccgtccaagtatgtgaacttcctctacctggcctcccactacgagaagctcaagggcagccccgaggacaacgagcagaagcagctgttcgtcgagcagcacaagcattacctcgacgagatcattgagcagatttccgagttctccaagcgcgtgatcctggccgacgcgaatctggataaggtcctctccgcgtacaacaagcaccgcgacaagccaatcagggagcaggctgagaatatcattcatctcttcaccctgacgaacctcggcgcccctgctgctttcaagtacttcgacacaactatcgatcgcaagaggtacacaagcactaaggaggtcctggacgcgaccctcatccaccagtcgattaccggcctctacgagacgcgcatcgacctgtctcagctcgggggcgacaagcggccagcggcgacgaagaaggcggggcaggcgaagaagaagaagtgagctcagagctttcgttcgtatcatcggtttcgacaacgttcgtcaagttcaatgcatcagtttcattgcgcacacaccagaatcctactgagtttgagtattatggcattgggaaaactgtttttcttgtaccatttgttgtgcttgtaatttactgtgttttttattcggttttcgctatcgaactgtgaaatggaaatggatggagaagagttaatgaatgatatggtccttttgttcattctcaaattaatattatttgttttttctcttatttgttgtgtgttgaatttgaaattataagagatatgcaaacattttgttttgagtaaaaatgtgtcaaatcgtggcctctaatgaccgaagttaatatgaggagtaaaacacttgtagttgtaccattatgcttattcactaggcaacaaatatattttcagacctagaaaagctgcaaatgttactgaatacaagtatgtcctcttgtgttttagacatttatgaactttcctttatgtaattttccagaatccttgtcagattctaatcattgctttataattatagttatactcatggatttgtagttgagtatgaaaatattttttaatgcattttatgacttgccaattgattgacaacgaattcgtaatcatgtcatagctgtttcctgtgtgaaattgttatccgctcacaattccacacaacatacgagccggaagcataaagtgtaaagcctggggtgcctaatgagtgagctaactcacattaattgcgttgcgctcactgcccgctttccagtcgggaaacctgtcgtgccagctgcattaatgaatcggccaacgcgcggggagaggcggtttgcgtattggctagagcagcttgccaacatggtggagcacgacactctcgtctactccaagaatatcaaagatacagtctcagaagaccaaagggctattgagacttttcaacaaagggtaatatcgggaaacctcctcggattccattgcccagctatctgtcacttcatcaaaaggacagtagaaaaggaaggtggcacctacaaatgccatcattgcgataaaggaaaggctatcgttcaagatgcctctgccgacagtggtcccaaagatggacccccacccacgaggagcatcgtggaaaaagaagacgttccaaccacgtcttcaaagcaagtggattgatgtgataacatggtggagcacgacactctcgtctactccaagaatatcaaagatacagtctcagaagaccaaagggctattgagacttttcaacaaagggtaatatcgggaaacctcctcggattccattgcccagctatctgtcacttcatcaaaaggacagtagaaaaggaaggtggcacctacaaatgccatcattgcgataaaggaaaggctatcgttcaagatgcctctgccgacagtggtcccaaagatggacccccacccacgaggagcatcgtggaaaaagaagacgttccaaccacgtcttcaaagcaagtggattgatgtgatatctccactgacgtaagggatgacgcacaatcccactatccttcgcaagaccttcctctatataaggaagttcatttcatttggagaggacacgctgaaatcaccagtctctctctacaaatctatctctctcgagctttcgcagatcccggggggcaatgagatatgaaaaagcctgaactcaccgcgacgtctgtcgagaagtttctgatcgaaaagttcgacagcgtctccgacctgatgcagctctcggagggcgaagaatctcgtgctttcagcttcgatgtaggagggcgtggatatgtcctgcgggtaaatagctgcgccgatggtttctacaaagatcgttatgtttatcggcactttgcatcggccgcgctcccgattccggaagtgcttgacattggggagtttagcgagagcctgacctattgcatctcccgccgtgcacagggtgtcacgttgcaagacctgcctgaaaccgaactgcccgctgttctacaaccggtcgcggaggctatggatgcgatcgctgcggccgatcttagccagacgagcgggttcggcccattcggaccgcaaggaatcggtcaatacactacatggcgtgatttcatatgcgcgattgctgatccccatgtgtatcactggcaaactgtgatggacgacaccgtcagtgcgtccgtcgcgcaggctctcgatgagctgatgctttgggccgaggactgccccgaagtccggcacctcgtgcacgcggatttcggctccaacaatgtcctgacggacaatggccgcataacagcggtcattgactggagcgaggcgatgttcggggattcccaatacgaggtcgccaacatcttcttctggaggccgtggttggcttgtatggagcagcagacgcgctacttcgagcggaggcatccggagcttgcaggatcgccacgactccgggcgtatatgctccgcattggtcttgaccaactctatcagagcttggttgacggcaatttcgatgatgcagcttgggcgcagggtcgatgcgacgcaatcgtccgatccggagccgggactgtcgggcgtacacaaatcgcccgcagaagcgcggccgtctggaccgatggctgtgtagaagtactcgccgatagtggaaaccgacgccccagcactcgtccgagggcaaagaaatagagtagatgccgaccggatctgtcgatcgacaagctcgagtttctccataataatgtgtgagtagttcccagataagggaattagggttcctatagggtttcgctcatgtgttgagcatataagaaacccttagtatgtatttgtatttgtaaaatacttctatcaataaaatttctaattcctaaaaccaaaatccagtactaaaatccagatcccccgaattaattcggcgttaattcagtacattaaaaacgtccgcaatgtgttattaagttgtctaagcgtcaatttgtttacaccacaatatatcctgccaccagccagccaacagctccccgaccggcagctcggcacaaaatcaccactcgatacaggcagcccatcagtccgggacggcgtcagcgggagagccgttgtaaggcggcagactttgctcatgttaccgatgctattcggaagaacggcaactaagctgccgggtttgaaacacggatgatctcgcggagggtagcatgttgattgtaacgatgacagagcgttgctgcctgtgatcaccgcggtttcaaaatcggctccgtcgatactatgttatacgccaactttgaaaacaactttgaaaaagctgttttctggtatttaaggttttagaatgcaaggaacagtgaattggagttcgtcttgttataattagcttcttggggtatctttaaatactgtagaaaagaggaaggaaataataaatggctaaaatgagaatatcaccggaattgaaaaaactgatcgaaaaataccgctgcgtaaaagatacggaaggaatgtctcctgctaaggtatataagctggtgggagaaaatgaaaacctatatttaaaaatgacggacagccggtataaagggaccacctatgatgtggaacgggaaaaggacatgatgctatggctggaaggaaagctgcctgttccaaaggtcctgcactttgaacggcatgatggctggagcaatctgctcatgagtgaggccgatggcgtcctttgctcggaagagtatgaagatgaacaaagccctgaaaagattatcgagctgtatgcggagtgcatcaggctctttcactccatcgacatatcggattgtccctatacgaatagcttagacagccgcttagccgaattggattacttactgaataacgatctggccgatgtggattgcgaaaactgggaagaagacactccatttaaagatccgcgcgagctgtatgattttttaaagacggaaaagcccgaagaggaacttgtcttttcccacggcgacctgggagacagcaacatctttgtgaaagatggcaaagtaagtggctttattgatcttgggagaagcggcagggcggacaagtggtatgacattgccttctgcgtccggtcgatcagggaggatatcggggaagaacagtatgtcgagctattttttgacttactggggatcaagcctgattgggagaaaataaaatattatattttactggatgaattgttttagtacctagaatgcatgaccaaaatcccttaacgtgagttttcgttccactgagcgtcagaccccgtagaaaagatcaaaggatcttcttgagatcctttttttctgcgcgtaatctgctgcttgcaaacaaaaaaaccaccgctaccagcggtggtttgtttgccggatcaagagctaccaactctttttccgaaggtaactggcttcagcagagcgcagataccaaatactgtccttctagtgtagccgtagttaggccaccacttcaagaactctgtagcaccgcctacatacctcgctctgctaatcctgttaccagtggctgctgccagtggcgataagtcgtgtcttaccgggttggactcaagacgatagttaccggataaggcgcagcggtcgggctgaacggggggttcgtgcacacagcccagcttggagcgaacgacctacaccgaactgagatacctacagcgtgagctatgagaaagcgccacgcttcccgaagggagaaaggcggacaggtatccggtaagcggcagggtcggaacaggagagcgcacgagggagcttccagggggaaacgcctggtatctttatagtcctgtcgggtttcgccacctctgacttgagcgtcgatttttgtgatgctcgtcaggggggcggagcctatggaaaaacgccagcaacgcggcctttttacggttcctggccttttgctggccttttgctcacatgttctttcctgcgttatcccctgattctgtggataaccgtattaccgcctttgagtgagctgataccgctcgccgcagccgaacgaccgagcgcagcgagtcagtgagcgaggaagcggaagagcgcctgatgcggtattttctccttacgcatctgtgcggtatttcacaccgcatatggtgcactctcagtacaatctgctctgatgccgcatagttaagccagtatacactccgctatcgctacgtgactgggtcatggctgcgccccgacacccgccaacacccgctgacgcgccctgacgggcttgtctgctcccggcatccgcttacagacaagctgtgaccgtctccgggagctgcatgtgtcagaggttttcaccgtcatcaccgaaacgcgcgaggcagggtgccttgatgtgggcgccggcggtcgagtggcgacggcgcggcttgtccgcgccctggtagattgcctggccgtaggccagccatttttgagcggccagcggccgcgataggccgacgcgaagcggcggggcgtagggagcgcagcgaccgaagggtaggcgctttttgcagctcttcggctgtgcgctggccagacagttatgcacaggccaggcgggttttaagagttttaataagttttaaagagttttaggcggaaaaatcgccttttttctcttttatatcagtcacttacatgtgtgaccggttcccaatgtacggctttgggttcccaatgtacgggttccggttcccaatgtacggctttgggttcccaatgtacgtgctatccacaggaaacagaccttttcgacctttttcccctgctagggcaatttgccctagcatctgctccgtacattaggaaccggcggatgcttcgccctcgatcaggttgcggtagcgcatgactaggatcgggccagcctgccccgcctcctccttcaaatcgtactccggcaggtcatttgacccgatcagcttgcgcacggtgaaacagaacttcttgaactctccggcgctgccactgcgttcgtagatcgtcttgaacaaccatctggcttctgccttgcctgcggcgcggcgtgccaggcggtagagaaaacggccgatgccgggatcgatcaaaaagtaatcggggtgaaccgtcagcacgtccgggttcttgccttctgtgatctcgcggtacatccaatcagctagctcgatctcgatgtactccggccgcccggtttcgctctttacgatcttgtagcggctaatcaaggcttcaccctcggataccgtcaccaggcggccgttcttggccttcttcgtacgctgcatggcaacgtgcgtggtgtttaaccgaatgcaggtttctaccaggtcgtctttctgctttccgccatcggctcgccggcagaacttgagtacgtccgcaacgtgtggacggaacacgcggccgggcttgtctcccttcccttcccggtatcggttcatggattcggttagatgggaaaccgccatcagtaccaggtcgtaatcccacacactggccatgccggccggccctgcggaaacctctacgtgcccgtctggaagctcgtagcggatcacctcgccagctcgtcggtcacgcttcgacagacggaaaacggccacgtccatgatgctgcgactatcgcgggtgcccacgtcatagagcatcggaacgaaaaaatctggttgctcgtcgcccttgggcggcttcctaatcgacggcgcaccggctgccggcggttgccgggattctttgcggattcgatcagcggccgcttgccacgattcaccggggcgtgcttctgcctcgatgcgttgccgctgggcggcctgcgcggccttcaacttctccaccaggtcatcacccagcgccgcgccgatttgtaccgggccggatggtttgcgaccgctcacgccgattcctcgggcttgggggttccagtgccattgcagggccggcagacaacccagccgcttacgcctggccaaccgcccgttcctccacacatggggcattccacggcgtcggtgcctggttgttcttgattttccatgccgcctcctttagccgctaaaattcatctactcatttattcatttgctcatttactctggtagctgcgcgatgtattcagatagcagctcggtaatggtcttgccttggcgtaccgcgtacatcttcagcttggtgtgatcctccgccggcaactgaaagttgacccgcttcatggctggcgtgtctgccaggctggccaacgttgcagccttgctgctgcgtgcgctcggacggccggcacttagcgtgtttgtgcttttgctcattttctctttacctcattaactcaaatgagttttgatttaatttcagcggccagcgcctggacctcgcgggcagcgtcgccctcgggttctgattcaagaacggttgtgccggcggcggcagtgcctgggtagctcacgcgctgcgtgatacgggactcaagaatgggcagctcgtacccggccagcgcctcggcaacctcaccgccgatgcgcgtgcctttgatcgcccgcgacacgacaaaggccgcttgtagccttccatccgtgacctcaatgcgctgcttaaccagctccaccaggtcggcggtggcccatatgtcgtaagggcttggctgcaccggaatcagcacgaagtcggctgccttgatcgcggacacagccaagtccgccgcctggggcgctccgtcgatcactacgaagtcgcgccggccgatggccttcacgtcgcggtcaatcgtcgggcggtcgatgccgacaacggttagcggttgatcttcccgcacggccgcccaatcgcgggcactgccctggggatcggaatcgactaacagaacatcggccccggcgagttgcagggcgcgggctagatgggttgcgatggtcgtcttgcctgacccgcctttctggttaagtacagcgataaccttcatgcgttccccttgcgtatttgtttatttactcatcgcatcatatacgcagcgaccgcatgacgcaagctgttttactcaaatacacatcacctttttagacggcggcgctcggtttcttcagcggccaagctggccggccaggccgccagcttggcatcagacaaaccggccaggatttcatgcagccgcacggttgagacgtgcgcgggcggctcgaacacgtacccggccgcgatcatctccgcctcgatctcttcggtaatgaaaaacggttcgtcctggccgtcctggtgcggtttcatgcttgttcctcttggcgttcattctcggcggccgccagggcgtcggcctcggtcaatgcgtcctcacggaaggcaccgcgccgcctggcctcggtgggcgtcacttcctcgctgcgctcaagtgcgcggtacagggtcgagcgatgcacgccaagcagtgcagccgcctctttcacggtgcggccttcctggtcgatcagctcgcgggcgtgcgcgatctgtgccggggtgagggtagggcgggggccaaacttcacgcctcgggccttggcggcctcgcgcccgctccgggtgcggtcgatgattagggaacgctcgaactcggcaatgccggcgaacacggtcaacaccatgcggccggccggcgtggtggtgtcggcccacggctctgccaggctacgcaggcccgcgccggcctcctggatgcgctcggcaatgtccagtaggtcgcgggtgctgcgggccaggcggtctagcctggtcactgtcacaacgtcgccagggcgtaggtggtcaagcatcctggccagctccgggcggtcgcgcctggtgccggtgatcttctcggaaaacagcttggtgcagccggccgcgtgcagttcggcccgttggttggtcaagtcctggtcgtcggtgctgacgcgggcatagcccagcaggccagcggcggcgctcttgttcatggcgtaatgtctccggttctagtcgcaagtattctactttatgcgactaaaacacgcgacaagaaaacgccaggaaaagggcagggcggcagcctgtcgcgtaacttaggacttgtgcgacatgtcgttttcagaagacggctgcactgaacgtcagaagccgactgcactatagcagcggaggggttggatcaaagtactttgatcccgaggggaaccctgtggttggcatgcacatacaaatggacgaacggataaaccttttcacgcccttttaaatatccgttattctaataaacgctcttttctcttag

SEQ ID NO: 33 - DNA, 20 bp, synthetic construct
  source 1..20: mol_type = other DNA
gtatgaagagagggaatgat

SEQ ID NO: 34 - DNA, 20 bp, synthetic construct
  source 1..20: mol_type = other DNA
ggcgttgttagtcgggtttc

SEQ ID NO: 35 - DNA, 20 bp, synthetic construct
  source 1..20: mol_type = other DNA
gaatcggtgagtctgtggga

SEQ ID NO: 36 - DNA, 20 bp, synthetic construct
  source 1..20: mol_type = other DNA
gacggacgattgagactaga

SEQ ID NO: 37 - DNA, 17265 bp, synthetic construct
  source 1..17265: mol_type = other DNA
taaacgctcttttctcttaggtttacccgccaatatatcctgtcaaacactgatagtttaaactgaaggcgggaaacgacaatctgatccaagctcaagctgctctagcattcgccattcaggctgcgcaactgttgggaagggcgatcggtgcgggcctcttcgctattacgccagctggcgaaagggggatgtgctgcaaggcgattaagttgggtaacgccagggttttcccagtcacgacgttgtaaaacgacggccagtgccaagcttcgacttgccttccgcacaatacatcatttcttcttagctttttttcttcttcttcgttcatacagtttttttttgtttatcagcttacattttcttgaaccgtagctttcgttttcttctttttaactttccattcggagtttttgtatcttgtttcatagtttgtcccaggattagaatgattaggcatcgaaccttcaagaatttgattgaataaaacatcttcattcttaagatatgaagataatcttcaaaaggcccctgggaatctgaaagaagagaagcaggcccatttatatgggaaagaacaatagtatttcttatataggcccatttaagttgaaaacaatcttcaaaagtcccacatcgcttagataagaaaacgaagctgagtttatatacagctagagtcgaagtagtgattgtatgaagagagggaatgatgttttagagctagaaatagcaagttaaaataaggctagtccgttatcaacttgaaaaagtggcaccgagtcggtgcttttttttgcaaaattttccagatcgatttcttcttcctctgttcttcggcgttcaatttctggggttttctcttcgttttctgtaactgaaacctaaaatttgacctaaaaaaaatctcaaataatatgattcagtggttttgtacttttcagttagttgagttttgcagttccgatgagataaaccaatattaatccaaactactgcagcctgacagacaaatgaggatgcaaacaattttaaagtttatctaacgctagctgttttgtttcttctctctggtgcaccaacgacggcgttttctcaatcataaagaggcttgttttacttaaggccaataatgttgatggatcgaaagaagagggcttttaataaacgagcccgtttaagctgtaaacgatgtcaaaaacatcccacatcgttcagttgaaaatagaagctctgtttatatattggtagagtcgactaagagattggcgttgttagtcgggtttcgttttagagctagaaatagcaagttaaaataaggctagtccgttatcaacttgaaaaagtggcaccgagtcggtgctttttttggatagaatttcccagcttttttgcgtgtttcagctctcatgatccttggccaatgggtgtagtaaattttctgcacattcattggatggaaaataatggttttagctttagggaataagaaaagtgtataggaaggggatttttgtacaatcacatttgaattaggtctttgaaatgacagggaatgaggacatatgatgagacggtcattgttttagttccaccacgattatatttgaaatttacgtgagtgtgagtgagacttgcataagaaaataaaatctttagttgggaaaaaattcaataatataaatgggcttgagaaggaagcgagggataggcctttttctaaaataggcccatttaagctattaacaatcttcaaaagtaccacagcgcttaggtaaagaaagcagctgagtttatatatggttagagacgaagtagtgattgaatcggtgagtctgtgggagttttagagctagaaatagcaagttaaaataaggctagtccgttatcaacttgaaaaagtggcaccgagtcggtgcttttttttggcaaaaattttcagattttttcttcatctgtagatttctgggtttttttttccgtttcgtgaatcataagtgaagttttggatgcaaatctgcgcgaaaaaagttggacctgcaatgagcttatttagatagctaagacaaagtgattggtccgttcgacttgccttccgcacaatacatcatttcttcttagctttttttcttcttcttcgttcatacagtttttttttgtttatcagcttacattttcttgaaccgtagctttcgttttcttctttttaactttccattcggagtttttgtatcttgtttcatagtttgtcccaggattagaatgattaggcatcgaaccttcaagaatttgattgaataaaacatcttcattcttaagatatgaagataatcttcaaaaggcccctgggaatctgaaagaagagaagcaggcccatttatatgggaaagaacaatagtatttcttatataggcccatttaagttgaaaacaatcttcaaaagtcccacatcgcttagataagaaaacgaagctgagtttatatacagctagagtcgaagtagtgattgacggacgattgagactagagttttagagctagaaatagcaagttaaaataaggctagtccgttatcaacttgaaaaagtggcaccgagtcggtgcttttttttgcaaaattttccagatcgatttcttcttcctctgttcttcggcgttcaatttctggggttttctcttcgttttctgtaactgaaacctaaaatttgacctaaaaaaaatctcaaataatatgattcagtggttttgtacttttcagttagttgagttttgcagttccgatgagataaaccaataagcttgcatgcctgcaggtcaacatggtggagcacgacacacttgtctactccaaaaatatcaaagatacagtctcagaagaccaaagggcaattgagacttttcaacaaagggtaatatccggaaacctcctcggattccattgcccagctatctgtcactttattgtgaagatagtggaaaaggaaggtggctcctacaaatgccatcattgcgataaaggaaaggccatcgttgaagatgcctctgccgacagtggtcccaaagatggacccccacccacgaggagcatcgtggaaaaagaagacgttccaaccacgtcttcaaagcaagtggattgatgtgataacatggtggagcacgacacacttgtctactccaaaaatatcaaagatacagtctcagaagaccaaagggcaattgagacttttcaacaaagggtaatatccggaaacctcctcggattccattgcccagctatctgtcactttattgtgaagatagtggaaaaggaaggtggctcctacaaatgccatcattgcgataaaggaaaggccatcgttgaagatgcctctgccgacagtggtcccaaagatggacccccacccacgaggagcatcgtggaaaaagaagacgttccaaccacgtcttcaaagcaagtggattgatgtgatatctccactgacgtaagggatgacgcacaatcccactatccttcgcaagacccttcctctatataaggaagttcatttcatttggagaggacctcgacctcaacacaacatatacaaaacaaacgaatctcaagcaatcaagcattctacttctattgcagcaatttaaatcatttcttttaaagcaaaagcaattttctgaaaattttcaccatttacgaacgatactcgagtaatctagatggattacaaggaccacgacggggattacaaggaccacgacattgattacaaggatgatgatgacaagatggctccgaagaagaagaggaaggttggcatccacggggtgccagctgctgacaagaagtactcgatcggcctcgatattgggactaactctgttggctgggccgtgatcaccgacgagtacaaggtgccctcaaagaagttcaaggtcctgggcaacaccgatcggcattccatcaagaagaatctcattggcgctctcctgttcgacagcggcgagacggctgaggctacgcggctcaagcgcaccgcccgcaggcggtacacgcgcaggaagaatcgcatctgctacctgcaggagattttctccaacgagatggcgaaggttgacgattctttcttccacaggctggaggagtcattcctcgtggaggaggataagaagcacgagcggcatccaatcttcggcaacattgtcgacgaggttgcctaccacgagaagtaccctacgatctaccatctgcggaagaagctcgtggactccacagataaggcggacctccgcctgatctacctcgctctggcccacatgattaagttcaggggccatttcctgatcgagggggatctcaacccggacaatagcgatgttgacaagctgttcatccagctcgtgcagacgtacaaccagctcttcgaggagaaccccattaatgcgtcaggcgtcgacgcgaaggctatcctgtccgctaggctctcgaagtctcggcgcctcgagaacctgatcgcccagctgccgggcgagaagaagaacggcctgttcgggaatctcattgcgctcagcctggggctcacgcccaacttcaagtcgaatttcgatctcgctgaggacgccaagctgcagctctccaaggacacatacgacgatgacctggataacctcctggcccagatcggcgatcagtacgcggacctgttcctcgctgccaagaatctgtcggacgccatcctcctgtctgatattctcagggtgaacaccgagattacgaaggctccgctctcagcctccatgatcaagcgctacgacgagcaccatcaggatctgaccctcctgaaggcgctggtcaggcagcagctccccgagaagtacaaggagatcttcttcgatcagtcgaagaacggctacgctgggtacattgacggcggggcctctcaggaggagttctacaagttcatcaagccgattctggagaagatggacggcacggaggagctgctggtgaagctcaatcgcgaggacctcctgaggaagcagcggacattcgataacggcagcatcccacaccagattcatctcggggagctgcacgctatcctgaggaggcaggaggacttctaccctttcctcaaggataaccgcgagaagatcgagaagattctgactttcaggatcccgtactacgtcggcccactcgctaggggcaactcccgcttcgcttggatgacccgcaagtcagaggagacgatcacgccgtggaacttcgaggaggtggtcgacaagggcgctagcgctcagtcgttcatcgagaggatgacgaatttcgacaagaacctgccaaatgagaaggtgctccctaagcactcgctcctgtacgagtacttcacagtctacaacgagctgactaaggtgaagtatgtgaccgagggcatgaggaagccggctttcctgtctggggagcagaagaaggccatcgtggacctcctgttcaagaccaaccggaaggtcacggttaagcagctcaaggaggactacttcaagaagattgagtgcttcgattcggtcgagatctctggcgttgaggaccgcttcaacgcctccctggggacctaccacgatctcctgaagatcattaaggataaggacttcctggacaacgaggagaatgaggatatcctcgaggacattgtgctgacactcactctgttcgaggaccgggagatgatcgaggagcgcctgaagacttacgcccatctcttcgatgacaaggtcatgaagcagctcaagaggaggaggtacaccggctgggggaggctgagcaggaagctcatcaacggcattcgggacaagcagtccgggaagacgatcctcgacttcctgaagagcgatggcttcgcgaaccgcaatttcatgcagctgattcacgatgacagcctcacattcaaggaggatatccagaaggctcaggtgagcggccagggggactcgctgcacgagcatatcgcgaacctcgctggctcgccagctatcaagaaggggattctgcagaccgtgaaggttgtggacgagctggtgaaggtcatgggcaggcacaagcctgagaacatcgtcattgagatggcccgggagaatcagaccacgcagaagggccagaagaactcacgcgagaggatgaagaggatcgaggagggcattaaggagctggggtcccagatcctcaaggagcacccggtggagaacacgcagctgcagaatgagaagctctacctgtactacctccagaatggccgcgatatgtatgtggaccaggagctggatattaacaggctcagcgattacgacgtcgatcatatcgttccacagtcattcctgaaggatgactccattgacaacaaggtcctcaccaggtcggacaagaaccggggcaagtctgataatgttccttcagaggaggtcgttaagaagatgaagaactactggcgccagctcctgaatgccaagctgatcacgcagcggaagttcgataacctcacaaaggctgagaggggcgggctctctgagctggacaaggcgggcttcatcaagaggcagctggtcgagacacggcagatcactaagcacgttgcgcagattctcgactcacggatgaacactaagtacgatgagaatgacaagctgatccgcgaggtgaaggtcatcaccctgaagtcaaagctcgtctccgacttcaggaaggatttccagttctacaaggttcgggagatcaacaattaccaccatgcccatgacgcgtacctgaacgcggtggtcggcacagctctgatcaagaagtacccaaagctcgagagcgagttcgtgtacggggactacaaggtttacgatgtgaggaagatgatcgccaagtcggagcaggagattggcaaggctaccgccaagtacttcttctactctaacattatgaatttcttcaagacagagatcactctggccaatggcgagatccggaagcgccccctcatcgagacgaacggcgagacgggggagatcgtgtgggacaagggcagggatttcgcgaccgtcaggaaggttctctccatgccacaagtgaatatcgtcaagaagacagaggtccagactggcgggttctctaaggagtcaattctgcctaagcggaacagcgacaagctcatcgcccgcaagaaggactgggatccgaagaagtacggcgggttcgacagccccactgtggcctactcggtcctggttgtggcgaaggttgagaagggcaagtccaagaagctcaagagcgtgaaggagctgctggggatcacgattatggagcgctccagcttcgagaagaacccgatcgatttcctggaggcgaagggctacaaggaggtgaagaaggacctgatcattaagctccccaagtactcactcttcgagctggagaacggcaggaagcggatgctggcttccgctggcgagctgcagaaggggaacgagctggctctgccgtccaagtatgtgaacttcctctacctggcctcccactacgagaagctcaagggcagccccgaggacaacgagcagaagcagctgttcgtcgagcagcacaagcattacctcgacgagatcattgagcagatttccgagttctccaagcgcgtgatcctggccgacgcgaatctggataaggtcctctccgcgtacaacaagcaccgcgacaagccaatcagggagcaggctgagaatatcattcatctcttcaccctgacgaacctcggcgcccctgctgctttcaagtacttcgacacaactatcgatcgcaagaggtacacaagcactaaggaggtcctggacgcgaccctcatccaccagtcgattaccggcctctacgagacgcgcatcgacctgtctcagctcgggggcgacaagcggccagcggcgacgaagaaggcggggcaggcgaagaagaagaagtgagctcagagctttcgttcgtatcatcggtttcgacaacgttcgtcaagttcaatgcatcagtttcattgcgcacacaccagaatcctactgagtttgagtattatggcattgggaaaactgtttttcttgtaccatttgttgtgcttgtaatttactgtgttttttattcggttttcgctatcgaactgtgaaatggaaatggatggagaagagttaatgaatgatatggtccttttgttcattctcaaattaatattatttgttttttctcttatttgttgtgtgttgaatttgaaattataagagatatgcaaacattttgttttgagtaaaaatgtgtcaaatcgtggcctctaatgaccgaagttaatatgaggagtaaaacacttgtagttgtaccattatgcttattcactaggcaacaaatatattttcagacctagaaaagctgcaaatgttactgaatacaagtatgtcctcttgtgttttagacatttatgaactttcctttatgtaattttccagaatccttgtcagattctaatcattgctttataattatagttatactcatggatttgtagttgagtatgaaaatattttttaatgcattttatgacttgccaattgattgacaacgaattcgtaatcatgtcatagctgtttcctgtgtgaaattgttatccgctcacaattccacacaacatacgagccggaagcataaagtgtaaagcctggggtgcctaatgagtgagctaactcacattaattgcgttgcgctcactgcccgctttccagtcgggaaacctgtcgtgccagctgcattaatgaatcggccaacgcgcggggagaggcggtttgcgtattggctagagcagcttgccaacatggtggagcacgacactctcgtctactccaagaatatcaaagatacagtctcagaagaccaaagggctattgagacttttcaacaaagggtaatatcgggaaacctcctcggattccattgcccagctatctgtcacttcatcaaaaggacagtagaaaaggaaggtggcacctacaaatgccatcattgcgataaaggaaaggctatcgttcaagatgcctctgccgacagtggtcccaaagatggacccccacccacgaggagcatcgtggaaaaagaagacgttccaaccacgtcttcaaagcaagtggattgatgtgaacatggtggagcacgacactctcgtctactccaagaatatcaaagatacagtctcagaagaccaaagggctattgagacttttcaacaaagggtaatatcgggaaacctcctcggattccattgcccagctatctgtcacttcatcaaaaggacagtagaaaaggaaggtggcacctacaaatgccatcattgcgataaaggaaaggctatcgttcaagatgcctctgccgacagtggtcccaaagatggacccccacccacgaggagcatcgtggaaaaagaagacgttccaaccacgtcttcaaagcaagtggattgatgtgatatctccactgacgtaagggatgacgcacaatcccactatccttcgcaagacccttcctctatataaggaagttcatttcatttggagaggacacgctgaaatcaccagtctctctctacaaatctatctctctcgagctttcgcagatccggggggcaatgagatatgaaaaagcctgaactcaccgcgacgtctgtcgagaagtttctgatcgaaaagttcgacagcgtctccgacctgatgcagctctcggagggcgaagaatctcgtgctttcagcttcgatgtaggagggcgtggatatgtcctgcgggtaaatagctgcgccgatggtttctacaaagatcgttatgtttatcggcactttgcatcggccgcgctcccgattccggaagtgcttgacattggggagtttagcgagagcctgacctattgcatctcccgccgttcacagggtgtcacgttgcaagacctgcctgaaaccgaactgcccgctgttctacaaccggtcgcggaggctatggatgcgatcgctgcggccgatcttagccagacgagcgggttcggcccattcggaccgcaaggaatcggtcaatacactacatggcgtgatttcatatgcgcgattgctgatccccatgtgtatcactggcaaactgtgatggacgacaccgtcagtgcgtccgtcgcgcaggctctcgatgagctgatgctttgggccgaggactgccccgaagtccggcacctcgtgcacgcggatttcggctccaacaatgtcctgacggacaatggccgcataacagcggtcattgactggagcgaggcgatgttcggggattcccaatacgaggtcgccaacatcttcttctggaggccgtggttggcttgtatggagcagcagacgcgctacttcgagcggaggcatccggagcttgcaggatcgccacgactccgggcgtatatgctccgcattggtcttgaccaactctatcagagcttggttgacggcaatttcgatgatgcagcttgggcgcagggtcgatgcgacgcaatcgtccgatccggagccgggactgtcgggcgtacacaaatcgcccgcagaagcgcggccgtctggaccgatggctgtgtagaagtactcgccgatagtggaaaccgacgccccagcactcgtccgagggcaaagaaatagagtagatgccgaccgggatctgtcgatcgacaagctcgagtttctccataataatgtgtgagtagttcccagataagggaattagggttcctatagggtttcgctcatgtgttgagcatataagaaacccttagtatgtatttgtatttgtaaaatacttctatcaataaaatttctaattcctaaaaccaaaatccagtactaaaatccagatcccccgaattaattcggcgttaattcagtacattaaaaacgtccgcaatgtgttattaagttgtctaagcgtcaatttgtttacaccacaatatatcctgccaccagccagccaacagctccccgaccggcagctcggcacaaaatcaccactcgatacaggcagcccatcagtccgggacggcgtcagcgggagagccgttgtaaggcggcagactttgctcatgttaccgatgctattcggaagaacggcaactaagctgccgggtttgaaacacggatgatctcgcggagggtagcatgttgattgtaacgatgacagagcgttgctgcctgtgatcaccgcggtttcaaaatcggctccgtcgatactatgttatacgccaactttgaaaacaactttgaaaaagctgttttctggtatttaaggttttagaatgcaaggaacagtgaattggagttcgtcttgttataattagcttcttggggtatctttaaatactgtagaaaagaggaaggaaataataaatggctaaaatgagaatatcaccggaattgaaaaaactgatcgaaaaataccgctgcgtaaaagatacggaaggaatgtctcctgctaaggtatataagctggtgggagaaaatgaaaacctatatttaaaaatgacggacagccggtataaagggaccacctatgatgtggaacgggaaaaggacatgatgctatggctggaaggaaagctgcctgttccaaaggtcctgcactttgaacggcatgatggctggagcaatctgctcatgagtgaggccgatggcgtcctttgctcggaagagtatgaagatgaacaaagccctgaaaagattatcgagctgtatgcggagtgcatcaggctctttcactccatcgacatatcggattgtccctatacgaatagcttagacagccgcttagccgaattggattacttactgaataacgatctggccgatgtggattgcgaaaactgggaagaagacactccatttaaagatccgcgcgagctgtatgattttttaaagacggaaaagcccgaagaggaacttgtcttttcccacggcgacctgggagacagcaacatctttgtgaaagatggcaaagtaagtggctttattgatcttgggagaagcggcagggcggacaagtggtatgacattgccttctgcgtccggtcgatcagggaggatatcggggaagaacagtatgtcgagctattttttgacttactggggatcaagcctgattgggagaaaataaaatattatattttactggatgaattgttttagtacctagaatgcatgaccaaaatcccttaacgtgagttttcgttccactgagcgtcagaccccgtagaaaagatcaaaggatcttcttgagatcctttttttctgcgcgtaatctgctgcttgcaaacaaaaaaaccaccgctaccagcggtggtttgtttgccggatcaagagctaccaactctttttccgaaggtaactggcttcagcagagcgcagataccaaatactgtccttctagtgtagccgtagttaggccaccacttcaagaactctgtagcaccgcctacatacctcgctctgctaatcctgttaccagtggctgctgccagtggcgataagtcgtgtcttaccgggttggactcaagacgatagttaccggataaggcgcagcggtcgggctgaacggggggttcgtgcacacagcccagcttggagcgaacgacctacaccgaactgagatacctacagcgtgagctatgagaaagcgccacgcttcccgaagggagaaaggcggacaggtatccggtaagcggcagggtcggaacaggagagcgcacgagggagcttccagggggaaacgcctggtatctttatagtcctgtcgggtttcgccacctctgacttgagcgtcgatttttgtgatgctcgtcaggggggcggagcctatggaaaaacgccagcaacgcggcctttttacggttcctggccttttgctggccttttgctcacatgttctttcctgcgttatcccctgattctgtggataaccgtattaccgcctttgagtgagctgataccgctcgccgcagccgaacgaccgagcgcagcgagtcagtgagcgaggaagcggaagagcgcctgatgcggtattttctccttacgcatctgtgcggtatttcacaccgcatatggtgcactctcagtacaatctgctctgatgccgcatagttaagccagtatacactccgctatcgctacgtgactgggtcatggctgcgccccgacacccgccaacacccgctgacgcgccctgacgggcttgtctgctcccggcatccgcttacagacaagctgtgaccgtctccgggagctgcatgtgtcagaggttttcaccgtcatcaccgaaacgcgcgaggcagggtgccttgatgtgggcgccggcggtcgagtggcgacggcgcggcttgtccgcgccctggtagattgcctggccgtaggccagccatttttgagcggccagcggccgcgataggccgacgcgaagcggcggggcgtagggagcgcagcgaccgaagggtaggcgctttttgcagctcttcggctgtgcgctggccagacagttatgcacaggccaggcgggttttaagagttttaataagttttaaagagttttaggcggaaaaatcgccttttttctcttttatatcagtcacttacatgtgtgaccggttcccaatgtacggctttgggttcccaatgtacgggttccggttcccaatgtacggctttgggttcccaatgtacgtgctatccacaggaaacagaccttttcgacctttttcccctgctagggcaatttgccctagcatctgctccgtacattaggaaccggcggatgcttcgccctcgatcaggttgcggtagcgcatgactaggatcgggccagcctgccccgcctcctccttcaaatcgtactccggcaggtcatttgacccgatcagcttgcgcacggtgaaacagaacttcttgaactctccggcgctgccactgcgttcgtagatcgtcttgaacaaccatctggcttctgccttgcctgcggcgcggcgtgccaggcggtagagaaaacggccgatgccgggatcgatcaaaaagtaatcggggtgaaccgtcagcacgtccgggttcttgccttctgtgatctcgcggtacatccaatcagctagctcgatctcgatgtactccggccgcccggtttcgctctttacgatcttgtagcggctaatcaaggcttcaccctcggataccgtcaccaggcggccgttcttggccttcttcgtacgctgcatggcaacgtgcgtggtgtttaaccgaatgcaggtttctaccaggtcgtctttctgctttccgccatcggctcgccggcagaacttgagtacgtccgcaacgtgtggacggaacacgcggccgggcttgtctcccttcccttcccggtatcggttcatggattcggttagatgggaaaccgccatcagtaccaggtcgtaatcccacacactggccatgccggccggccctgcggaaacctctacgtgcccgtctggaagctcgtagcggatcacctcgccagctcgtcggtcacgcttcgacagacggaaaacggccacgtccatgatgctgcgactatcgcgggtgcccacgtcatagagcatcggaacgaaaaaatctggttgctcgtcgcccttgggcggcttcctaatcgacggcgcaccggctgccggcggttgccgggattctttgcggattcgatcagcggccgcttgccacgattcaccggggcgtgcttctgcctcgatgcgttgccgctgggcggcctgcgcggccttcaacttctccaccaggtcatcacccagcgccgcgccgatttgtaccgggccggatggtttgcgaccgctcacgccgattcctcgggcttgggggttccagtgccattgcagggccggcaggcaacccagccgcttacgcctggccaaccgcccgttcctccacacatggggcattccacggcgtcggtgcctggttgttcttgattttccatgccgcctcctttagccgctaaaattcatctactcatttattcatttgctcatttactctggtagctgcgcgatgtattcagatagcagctcggtaatggtcttgccttggcgtaccgcgtacatcttcagcttggtgtgatcctccgccggcaactgaaagttgacccgcttcatggctggcgtgtctgccaggctggccaacgttgcagccttgctgctgcgtgcgctcggacggccggcacttagcgtgtttgtgcttttgctcattttctctttacctcattaactcaaatgagttttgatttaatttcagcggccagcgcctggacctcgcgggcagcgtcgccctcgggttctgattcaagaacggttgtgccggcggcggcagtgcctgggtagctcacgcgctgcgtgatacgggactcaagaatgggcagctcgtacccggccagcgcctcggcaacctcaccgccgatgcgcgtgcctttgatcgcccgcgacacgacaaaggccgcttgtagccttccatccgtgacctcaatgcgctgcttaaccagctccaccaggtcggcggtggcccatatgtcgtaagggcttggctgcaccggaatcagcacgaagtcggctgccttgatcgcggacacagccaagtccgccgcctggggcgctccgtcgatcactacgaagtcgcgccggccgatggccttcacgtcgcggtcaatcgtcgggcggtcgatgccgacaacggttagcggttgatcttcccgcacggccgcccaatcgcgggcactgccctggggatcggaatcgactaacagaacatcggccccggcgagttgcagggcgcgggctagatgggttgcgatggtcgtcttgcctgacccgcctttctggttaagtacagcgataaccttcatgcgttccccttgcgtatttgtttatttactcatcgcatcatatacgcagcgaccgcatgacgcaagctgttttactcaaatacacatcacctttttagacggcggcgctcggtttcttcagcggccaagctggccggccaggccgccagcttggcatcagacaaaccggccaggatttcatgcagccgcacggttgagacgtgcgcgggcggctcgaacacgtacccggccgcgatcatctccgcctcgatctcttcggtaatgaaaaacggttcgtcctggccgtcctggtgcggtttcatgcttgttcctcttggcgttcattctcggcggccgccagggcgtcggcctcggtcaatgcgtcctcacggaaggcaccgcgccgcctggcctcggtgggcgtcacttcctcgctgcgctcaagtgcgcggtacagggtcgagcgatgcacgccaagcagtgcagccgcctctttcacggtgcggccttcctggtcgatcagctcgcgggcgtgcgcgatctgtgccggggtgagggtagggcgggggccaaacttcacgcctcgggccttggcggcctcgcgcccgctccgggtgcggtcgatgattagggaacgctcgaactcggcaatgccggcgaacacggtcaacaccatgcggccggccggcgtggtggtgtcggcccacggctctgccaggctacgcaggcccgcgccggcctcctggatgcgctcggcaatgtccagtaggtcgcgggtgctgcgggccaggcggtctagcctggtcactgtcacaacgtcgccagggcgtaggtggtcaagcatcctggccagctccgggcggtcgcgcctggtgccggtgatcttctcggaaaacagcttggtgcagccggccgcgtgcagttcggcccgttggttggtcaagtcctggtcgtcggtgctgacgcgggcatagcccagcaggccagcggcggcgctcttgttcatggcgtaatgtctccggttctagtcgcaagtattctactttatgcgactaaaacacgcgacaagaaaacgccaggaaaagggcagggcggcagcctgtcgcgtaacttaggacttgtgcgacatgtcgttttcagaagacggctgcactgaacgtcagaagccgactgcactatagcagcggaggggttggatcaaagtactttgatcccgaggggaaccctgtggttggcatgcacatacaaatggacgaacggataaaccttttcacgcccttttaaatatccgattattctaa

What is claimed is:

1. A modified plant or part thereof, plant cell, or seed exhibiting reduced developmental plasticity, comprising:
a. a modification of an endogenous polynucleotide sequence encoding a component of the circadian clock; and
b. an exogenous polynucleotide sequence encoding an environmental signal sensor;
wherein the modification of the endogenous polynucleotide sequence encoding the component of the circadian clock modifies expression of the component of the circadian clock; and
wherein the modification of the endogenous polynucleotide encoding the environmental signal sensor modifies expression of the environmental signal sensor; and
wherein the modified expression of the component of the circadian clock and of the environmental signal sensor causes the plant to exhibit (i) reduced developmental plasticity in response to changes in environmental conditions during growth and (ii) modified circadian function.

2. The modified plant or part thereof, plant cell, or seed of claim 1, wherein the component of the circadian clock is a component of the evening complex (EC).

3. The modified plant or part thereof, plant cell, or seed of claim 1 or claim 2, wherein the component of the circadian clock is selected from EARLY FLOWERING 3 (ELF3), EARLY FLOWERING 4 (ELF4), LUX ARRHYTHMO (LUX), or any combination thereof.

4. The modified plant or part thereof, plant cell, or seed of any of the preceding claims, wherein the component of the circadian clock is an ELF3 protein.

5. The modified plant or part thereof, plant cell, or seed of claim 4, wherein the modification of a polynucleotide encoding the ELF3 protein is a loss-of-function mutation.

6. The modified plant or part thereof, plant cell, or seed of claim 5, wherein the plant is Arabidopsis thaliana (A. thaliana).

7. The modified plant or part thereof, plant cell, or seed of claim 6, wherein the ELF3 protein comprises an amino acid sequence comprising at least about 75% or more, at least about 85% or more, at least about 95% or more, or 100% sequence identity with an amino acid sequence of SEQ ID NO: 2.

8. The modified plant or part thereof, plant cell, or seed of claim 6, wherein the polynucleotide encoding ELF3 comprises a nucleic acid sequence comprising at least about 75% or more, at least about 85% or more, at least about 95% or more, or 100% sequence identity with a nucleic acid sequence of SEQ ID NO: 1 and an ELF3 loss-of-function mutation comprises about 75% or more, at least about 85% or more, at least about 95% or more, or 100% sequence identity with a nucleic acid sequence of SEQ ID NO: 3 (elf3-1), SEQ ID NO: 4 (elf3-2), or a combination thereof.

9. The modified plant or part thereof, plant cell, or seed of claim 5, wherein the modified plant is Thlaspi arvense (T. arvense).

10. The modified plant or part thereof, plant cell, or seed of claim 9, wherein the ELF3 protein comprises an amino acid sequence comprising at least about 75% or more, at least about 85% or more, at least about 95% or more, or 100% sequence identity with an amino acid sequence of SEQ ID NO: 21.

11. The modified plant or part thereof, plant cell, or seed of claim 10, wherein the polynucleotide encoding the ELF3 protein comprises a nucleic acid sequence comprising at least about 75% or more, at least about 85% or more, at least about 95% or more, or 100% sequence identity with a nucleic acid sequence of SEQ ID NO: 20.

12. The modified plant or part thereof, plant cell, or seed of claim 10, wherein the modification of the polynucleotide encoding the ELF3 protein comprises a deletion of a nucleic acid segment in the polynucleotide encoding the ELF3 protein, wherein the nucleic acid segment comprises about 75% or more, at least about 85% or more, at least about 95% or more, or 100% sequence identity with a nucleic acid sequence of SEQ ID NO: 22, a sequence comprising the AGCGCTA nucleic acid sequence, or a combination thereof.

13. The modified plant or part thereof, plant cell, or seed of claim 10, wherein the modification of the polynucleotide encoding the ELF3 protein comprises a modification introduced by a programmable nucleic acid modification system comprising a CRISPR/Cas nuclease system, wherein the CRISPR/Cas nuclease system comprises a CAS9 protein (dCAS9) and a guide RNA (gRNA).

14. The modified plant or part thereof, plant cell, or seed of claim 13, wherein the Cas9 protein is encoded by a nucleic acid sequence comprising at least about 75% or more, at least about 85% or more, at least about 95% or more, or 100% sequence identity with a nucleic acid sequence of SEQ ID NO: 29 and the gRNA comprises a nucleic acid sequence of SEQ ID NO: 30, SEQ ID NO: 31, or a combination thereof.

15. The modified plant or part thereof, plant cell, or seed of claim 13, wherein an expression construct expressing the Cas9 protein comprises a nucleic acid sequence comprising at least about 75% or more, at least about 85% or more, at least about 95% or more, or 100% sequence identity with a nucleic acid sequence starting at base number 1552 to base number 7881 of SEQ ID NO: 32.

16. The modified plant or part thereof, plant cell, or seed of claim 5, wherein the plant is Basil.

17. The modified plant or part thereof, plant cell, or seed of claim 16, wherein the polynucleotide encoding ELF3 comprises a nucleic acid sequence comprising at least about 75% or more, at least about 85% or more, at least about 95% or more, or 100% sequence identity with a nucleic acid sequence of SEQ ID NO: 13.

18. The modified plant or part thereof, plant cell, or seed of claim 17, wherein the modification of the polynucleotide encoding the ELF3 protein comprises a modification introduced by a programmable nucleic acid modification system comprising a CRISPR/Cas nuclease system, wherein the CRISPR/Cas nuclease system comprises a CAS9 protein (dCAS9) and a guide RNA (gRNA).

19. The modified plant or part thereof, plant cell, or seed of claim 18, wherein the Cas9 protein is encoded by a nucleic acid sequence comprising at least about 75% or more, at least about 85% or more, at least about 95% or more, or 100% sequence identity with a nucleic acid sequence of SEQ ID NO: 29 and the gRNA comprises a nucleic acid sequence of SEQ ID NOs: 33-36, or any combination thereof.

20. The modified plant or part thereof, plant cell, or seed of claim 19, wherein an expression construct expressing the Cas9 protein comprises a nucleic acid sequence comprising at least about 75% or more, at least about 85% or more, at least about 95% or more, or 100% sequence identity with a nucleic acid sequence starting at base number 1552 to base number 7881 of SEQ ID NO: 32.

21. The modified plant or part thereof, plant cell, or seed of any of the preceding claims, wherein the environmental signal comprises photoperiod, light intensity and quality, temperature, chemicals, gravity, moisture, biotic or abiotic stress, oxygen and carbon dioxide concentrations, carbohydrate availability, or any combination thereof.

22. The modified plant or part thereof, plant cell, or seed of any of the preceding claims, wherein the environmental signal sensor is a photoreceptor, temperature sensor, CO₂ sensor, O₂ sensor, ethylene sensor, gravitropic sensor, or any combination thereof.

23. The modified plant or part thereof, plant cell, or seed of any of the preceding claims, wherein the environmental signal sensor is a photoreceptor.

24. The modified plant or part thereof, plant cell, or seed of claim 23, wherein the photoreceptor is a phytochrome; a cryptochrome, a phototropin, an F-box containing Flavin binding proteins; UVR8, or any combination thereof.

25. The modified plant or part thereof, plant cell, or seed of claim 23 or 24, wherein the photoreceptor is a phytochrome photoreceptor.

26. The modified plant or part thereof, plant cell, or seed of any of the preceding claims, wherein the polynucleotide encoding an environmental signal sensor encodes a phytochrome B photoreceptor.

27. The modified plant or part thereof, plant cell, or seed of claim 26, wherein the phytochrome B photoreceptor comprises an amino acid sequence comprising at least about 75% or more, at least about 85% or more, at least about 95% or more, or 100% sequence identity with an amino acid sequence of SEQ ID NO: 6 or SEQ ID NO: 28.

28. The modified plant or part thereof, plant cell, or seed of claim 27, wherein the polynucleotide encoding the phytochrome B photoreceptor comprises least about 75% or more, at least about 85% or more, at least about 95% or more, or 100% sequence identity with a nucleic acid sequence of SEQ ID NO: 5 or SEQ ID NO: 28.

29. The modified plant or part thereof, plant cell, or seed of claim 26, wherein the phytochrome B photoreceptor is overexpressed, constitutively expressed, or constitutively active.

30. The modified plant or part thereof, plant cell, or seed of claim 29, wherein the modification of a polynucleotide encoding a phyB photoreceptor encodes a constitutively active phyB photoreceptor.

31. The modified plant or part thereof, plant cell, or seed of claim 30, wherein the phytochrome B photoreceptor comprises an amino acid sequence comprising at least about 75% or more, at least about 85% or more, at least about 95% or more, or 100% sequence identity with an amino acid sequence of SEQ ID NO: 8 SEQ ID NO: 12, SEQ ID NO: 26, or any combination thereof.

32. The modified plant or part thereof, plant cell, or seed of claim 30, wherein the polynucleotide encoding the phytochrome B photoreceptor comprises least about 75% or more, at least about 85% or more, at least about 95% or more, or 100% sequence identity with a nucleic acid sequence of SEQ ID NO: 7, SEQ ID NO: 11, SEQ ID NO: 25, or any combination thereof.

33. The modified plant or part thereof, plant cell, or seed of claim 30, wherein the modified plant is Arabidopsis thaliana (A. thaliana).

34. The modified plant or part thereof, plant cell, or seed of claim 33, wherein the modified A. thaliana plant comprises a genetic modification of a polynucleotide encoding PhyB, wherein the polynucleotide comprising the genetic modification encodes a constitutively active PhyB photoreceptor.

35. The modified plant or part thereof, plant cell, or seed of claim 34, wherein constitutively active PhyB photoreceptor comprises an amino acid sequence comprising at least about 75% or more, at least about 85% or more, at least about 95% or more, or 100% sequence identity with an amino acid sequence of SEQ ID NO: 8 SEQ ID NO: 12, SEQ ID NO: 26, or any combination thereof.

36. The modified plant or part thereof, plant cell, or seed of claim 34, wherein constitutively active PhyB photoreceptor is encoded by a nucleic acid sequence comprising at least about 75% or more, at least about 85% or more, at least about 95% or more, or 100% sequence identity with an amino acid sequence of SEQ ID NO: 7, SEQ ID NO: 11, SEQ ID NO: 25, or any combination thereof.

37. The modified plant or part thereof, plant cell, or seed of claim 34, wherein constitutively active PhyB photoreceptor comprises an amino acid sequence comprising at least about 75% or more, at least about 85% or more, at least about 95% or more, or 100% sequence identity with an amino acid sequence of SEQ ID NO: 8, SEQ ID NO: 12, or both.

38. The modified plant or part thereof, plant cell, or seed of claim 34, wherein the constitutively active PhyB photoreceptor is encoded by a nucleic acid sequence comprising at least about 75% or more, at least about 85% or more, at least about 95% or more, or 100% sequence identity with an amino acid sequence of SEQ ID NO: 7, SEQ ID NO: 11, or both.

39. The modified plant or part thereof, plant cell, or seed of claim 30, wherein the modified plant is Thlaspi arvensis (T. arvensis).

40. The modified plant or part thereof, plant cell, or seed of claim 39, wherein the modified T. arvensis plant comprises a genetic modification of a polynucleotide encoding PhyB, wherein the polynucleotide comprising the genetic modification encodes a constitutively active PhyB photoreceptor.

41. The modified plant or part thereof, plant cell, or seed of claim 40, wherein the constitutively active PhyB photoreceptor comprises an amino acid sequence comprising at least about 75% or more, at least about 85% or more, at least about 95% or more, or 100% sequence identity with an amino acid sequence of SEQ ID NO: 8 SEQ ID NO: 12, SEQ ID NO: 26, or any combination thereof.

42. The modified plant or part thereof, plant cell, or seed of claim 40, wherein the constitutively active PhyB photoreceptor is encoded by a nucleic acid sequence comprising at least about 75% or more, at least about 85% or more, at least about 95% or more, or 100% sequence identity with an amino acid sequence of SEQ ID NO: 7, SEQ ID NO: 11, SEQ ID NO: 25, or SEQ ID NO: 27.

43. The modified plant or part thereof, plant cell, or seed of claim 40, wherein the constitutively active PhyB photoreceptor comprises an amino acid sequence comprising at least about 75% or more, at least about 85% or more, at least about 95% or more, or 100% sequence identity with an amino acid sequence of SEQ ID NO: 26.

44. The modified plant or part thereof, plant cell, or seed of claim 40, wherein the constitutively active PhyB photoreceptor is encoded by a nucleic acid sequence comprising at least about 75% or more, at least about 85% or more, at least about 95% or more, or 100% sequence identity with an amino acid sequence of SEQ ID NO: 25.

45. The modified plant or part thereof, plant cell, or seed of any of the preceding claims, comprising:
a. a modification of a polynucleotide encoding an ELF3 protein wherein the polynucleotide encoding the ELF3 protein comprises an ELF3 loss-of-function mutation, and
b. a modification of a polynucleotide encoding a phyB photoreceptor wherein the polynucleotide encodes a constitutively active PhyB photoreceptor.

46. The modified plant or part thereof, plant cell, or seed of any of the preceding claims, wherein the modified plant comprises constitutively inactivated temperature input to the circadian clock and a constitutively activated light input to the circadian clock.

47. The modified plant or part thereof, plant cell, or seed of any of the preceding claims, wherein the modified plant is not etiolated, flowers earlier and consistently regardless of changes in day length and has a reduced cellular elongation response to increasing temperature thereby reducing listing in the field, and any combination thereof.

48. The modified plant or part thereof, plant cell, or seed of claim 1, wherein the modified plant is plant is A. thaliana comprising:
a. a polynucleotide encoding an ELF3 protein wherein the polynucleotide encoding the ELF3 protein comprises an ELF3 loss-of-function mutation, wherein the polynucleotide comprises a nucleic acid sequence comprising at least about 75% or more, at least about 85% or more, at least about 95% or more, or 100% sequence identity with an amino acid sequence of SEQ ID NO: 3 (elf3-1), SEQ ID NO: 4 (elf3-2), or a combination thereof; and
b. a polynucleotide encoding a constitutively active PhyB photoreceptor, wherein the polynucleotide comprises a nucleic acid sequence comprising at least about 75% or more, at least about 85% or more, at least about 95% or more, or 100% sequence identity with an amino acid sequence of SEQ ID NO: 7, SEQ ID NO: 11, or a combination thereof.

49. The modified plant or part thereof, plant cell, or seed of claim 1, wherein the modified plant is plant is T. arvensis comprising:
a. a polynucleotide encoding an ELF3 protein wherein the polynucleotide encoding the ELF3 protein comprises an ELF3 loss-of-function mutation, wherein the polynucleotide comprises a nucleic acid sequence comprising at least about 75% or more, at least about 85% or more, at least about 95% or more, or 100% sequence identity with an amino acid sequence of SEQ ID NO: 22, a sequence comprising the AGCGCTA nucleic acid sequence, or a combination thereof; and
b. a polynucleotide encoding a constitutively active PhyB photoreceptor, wherein the polynucleotide comprises a nucleic acid sequence comprising at least about 75% or more, at least about 85% or more, at least about 95% or more, or 100% sequence identity with an amino acid sequence of SEQ ID NO: 25.

50. A system for modifying a component of the circadian clock, an environmental signal sensor, or both in a plant or part thereof, plant cell, or seed, the system comprising a nucleic acid construct comprising at least one or both of:
a. a programmable nucleic acid modification system comprising a targeting nucleic acid sequence targeting a nucleic acid sequence in a polynucleotide sequence encoding a component of the circadian clock; and
b. an expression construct comprising a promoter operably linked to a polynucleotide encoding a polynucleotide encoding an environmental signal sensor;
wherein (a) introduces a loss of function mutation into the polynucleotide sequence encoding the component of the circadian clock, and
wherein (b) increases expression of the environmental signal sensor, thereby causing the plant to exhibit reduced developmental plasticity in response to changes in environmental conditions during growth and modified circadian function.

51. The system of claim 50, wherein the programmable nucleic acid modification system introduces a loss of function mutation into a polynucleotide encoding an ELF3 protein.

52. The system of claim 51, wherein the programmable nucleic acid modification system comprises a CRISPR/Cas nuclease system comprising a CAS9 protein (dCAS9) and a guide RNA (gRNA).

53. The system of claim 52, wherein the plant is Thlaspi arvense.

54. The system of claim 53, wherein the Cas9 protein is encoded by a nucleic acid sequence comprising at least about 75% or more, at least about 85% or more, at least about 95% or more, or 100% sequence identity with a nucleic acid sequence of SEQ ID NO: 29 and the gRNA comprises a nucleic acid sequence of SEQ ID NO: 30, SEQ ID NO: 31, or both.

55. The system of claim 52, wherein the plant is Basil.

56. The system of claim 55, wherein the Cas9 protein is encoded by a nucleic acid sequence comprising at least about 75% or more, at least about 85% or more, at least about 95% or more, or 100% sequence identity with a nucleic acid sequence of SEQ ID NO: 29 and the gRNA comprises a nucleic acid sequence of SEQ ID NOs: 33-36, or any combination thereof.

57. The system of claim 50, wherein the expression construct comprises a promoter operably linked to a polynucleotide encoding a polynucleotide encoding a PhyB photoreceptor, wherein the expression construct increases expression of PhyB.

58. The system of claim 57, wherein the expression construct comprising a promoter operably linked to a polynucleotide encoding an environmental signal sensor comprises a 35S promoter operably linked to a polynucleotide encoding the PhyB photoreceptor and wherein the construct constitutively expresses the PhyB photoreceptor.

59. The system of claim 57, wherein the PhyB photoreceptor is constitutively active.

60. The system of claim 59, wherein the expression construct comprises a nucleic acid sequence comprising about 75% or more, at least about 85% or more, at least about 95% or more, or 100% sequence identity with SEQ ID NO: 24.

61. The system of claim 60, wherein the expression construct comprises a nucleic acid sequence comprising a nucleic acid sequence comprising about 75% or more, at least about 85% or more, at least about 95% or more, or 100% of a nucleic acid sequence starting at base 8148 to base 12020 of SEQ ID NO: 19.

62. One or more expression constructs for modifying a plant or part thereof, plant cell, or seed to exhibit reduced developmental plasticity, the one or more expression constructs comprising at least one or both of:
a. an expression construct for modifying the expression of a component of the circadian clock; and
b. an expression construct for modifying the expression of an environmental signal sensor.

63. The one or more expression constructs of claim 62, wherein (a) comprises a promoter operably linked to a polynucleotide encoding a programmable nucleic acid modification system targeted to a nucleic acid sequence in a polynucleotide encoding a component of the circadian clock.

64. The one or more expression constructs of claim 63, wherein the programmable nucleic acid modification system comprises a CRISPR/Cas nuclease system and wherein the CRISPR/Cas nuclease system comprises a CAS9 protein (dCAS9) and a guide RNA (gRNA).

65. The one or more expression constructs of claim 64, wherein an expression construct expressing the Cas9 protein comprises a nucleic acid sequence comprising at least about 75% or more, at least about 85% or more, at least about 95% or more, or 100% sequence identity with a nucleic acid sequence starting at base number 1552 to base number 7881 of SEQ ID NO: 32.

66. The one or more expression constructs of claim 64, wherein the plant is Thlaspi arvense.

67. The one or more expression constructs of claim 66, wherein the polynucleotide encoding a component of the circadian clock encodes ELF3 and wherein the polynucleotide encoding ELF3 comprises a nucleic acid sequence comprising at least about 75% or more, at least about 85% or more, at least about 95% or more, or 100% sequence identity with a nucleic acid sequence of SEQ ID NO: 20 and wherein the gRNA comprises a nucleic acid sequence of SEQ ID NO: 30, SEQ ID NO: 31, or both.

68. The one or more expression constructs of claim 66, wherein the expression construct comprises a nucleic acid sequence comprising about 75% or more, at least about 85% or more, at least about 95% or more, or 100% sequence identity with a nucleic acid sequence starting at base 254 to base 1287 of SEQ ID NO: 32.

69. The one or more expression constructs of claim 64, wherein the plant is Basil.

70. The one or more expression constructs of claim 69, wherein the polynucleotide encoding a component of the circadian clock encodes ELF3 and wherein the polynucleotide encoding ELF3 comprises a nucleic acid sequence comprising at least about 75% or more, at least about 85% or more, at least about 95% or more, or 100% sequence identity with a nucleic acid sequence of SEQ ID NO: 13 and wherein the gRNA comprises a nucleic acid sequence of SEQ ID NOs: 33-36, or any combination thereof.

71. The one or more expression constructs of claim 70, wherein the expression construct expressing the gRNA of SEQ ID NOs: 33-36 comprises a nucleic acid sequence comprising about 75% or more, at least about 85% or more, at least about 95% or more, or 100% sequence identity with the gRNA expression construct of SEQ ID NO: 37.

72. The one or more expression constructs of claim 70, wherein an expression construct expressing the gRNA of SEQ ID NOs: 33-36 comprises about 75% or more, at least about 85% or more, at least about 95% or more, or 100% sequence identity with SEQ ID NO: 23.

73. The one or more expression constructs of claim 70, wherein an expression construct expressing the gRNA of SEQ ID NOs: 33-36 comprises about 75% or more, at least about 85% or more, at least about 95% or more, or 100% of a nucleic acid sequence starting at base 695 to base 2799 of SEQ ID NO: 37.

74. The one or more expression constructs of claim 62, wherein the expression construct comprising a promoter operably linked to a polynucleotide encoding an environmental signal sensor comprises a constitutive expression promoter operably linked to a polynucleotide encoding a PhyB photoreceptor.

75. The one or more expression constructs of claim 74, wherein the expression construct comprising a promoter operably linked to a polynucleotide encoding an environmental signal sensor comprises a 35S promoter operably linked to a polynucleotide encoding a constitutively active PhyB photoreceptor.

76. The one or more expression constructs of claim 75, wherein the constitutively active PhyB photoreceptor is encoded by a nucleic acid sequence comprising about 75% or more, at least about 85% or more, at least about 95% or more, or 100% sequence identity with a nucleic acid sequence of SEQ ID NO: 7, SEQ ID NO: 11, or both.

77. The one or more expression constructs of claim 75, wherein the expression construct comprises a nucleic acid sequence comprising about 75% or more, at least about 85% or more, at least about 95% or more, or 100% sequence identity with SEQ ID NO: 24.

78. The one or more expression constructs of claim 75, wherein the expression construct comprising a nucleic acid sequence comprising about 75% or more, at least about 85% or more, at least about 95% or more, or 100% of a nucleic acid sequence starting at base 8148 to base 12020 of SEQ ID NO: 19.

79. A modified plant or part thereof, plant cell, or seed thereof comprising one or more expression constructs of claims 62-78.

80. A method of improving performance of a plant or part thereof, plant cell, or seed grown under intensive, precision outdoor farming conditions, Total Controlled Environment Agriculture (TCEA), or vertical farming, the method comprising:
a. obtaining or having obtained a modified plant of any one of claims 1-49; and
b. cultivating the plant under intensive, precision outdoor farming conditions, TCEA, or vertical farming.

81. A method of reducing developmental plasticity of a plant or part thereof, plant cell, or seed, the method comprising generating a modified plant of any one of claims 1-49.

82. The method of claim 81, wherein the plant is resistant to changes in growth conditions of the plant.

83. The method of claim 82, wherein the growth conditions comprise daylength and temperature.

84. A method of reducing a plastic response to competition among a co-cultivated group of modified plants or parts thereof, plant cells, or seeds, the method comprising, co-cultivating a group of plants of any of claims 1-49.

85. A method of stabilizing production of a metabolite, nucleic acid, or protein in a plant or part thereof, plant cell, or seed, the method comprising:
a. obtaining or having obtained a modified plant or part thereof, plant cell, or seed of any of claims 1-49;
b. cultivating the plant for a time sufficient to generate the metabolite, nucleic acid, or protein; and
c. harvesting the metabolite, nucleic acid, or protein from the plant or part thereof, plant cell, or seed.

86. The method of claim 85, wherein the plant or part thereof, plant cell, or seed is grown under intensive, precision outdoor farming conditions, TCEA, or vertical farming.

87. The method of claim 85, wherein stabilizing production of a metabolite, nucleic acid, or protein comprises equal production of the metabolite, nucleic acid, or protein irrespective of light period, temperature variation or both.

88. A kit for modifying a plant or part thereof, plant cell, or seed exhibiting reduced developmental plasticity, the kit comprising:
a. one or more modified plants or parts thereof, plant cells, or seeds of any one of claims 1-49;
b. one or more expression constructs of any one of claims 62-78:
c. one or more modified plants, plant cells, or parts thereof of claim 79; or
d. any combination of (a) to (c).
